(19) United States
(12) Patent Application Publication
(10) Pub. No.: US 2025/0249027 A1
(43) Pub. Date: Aug. 7, 2025

(54) PRODUCTS AND COMPOSITIONS

(71) Applicant: Sirnaomics, Inc., Germantown, MD (US)

(72) Inventors: Dmitry SAMARSKY, Germantown, MD (US); Jack WEI, Germantown, MD (US)

(21) Appl. No.: 18/974,081

(22) Filed: Dec. 9, 2024

Related U.S. Application Data
(63) Continuation of application No. PCT/US23/68134, filed on Jun. 8, 2023.
(60) Provisional application No. 63/350,405, filed on Jun. 8, 2022.
(60) Provisional application No. 63/407,428, filed on Sep. 16, 2022.

(51) Int. Cl. A61K 31/7125; A61K 45/06

(52) U.S. Cl. CPC A61K 31/7125; A61K 45/06

(57) ABSTRACT

Nucleic acid products are provided that modulate, in particular interfere with or inhibit C3 gene expression. The products can be oligomeric compounds that comprise at least a first region of linked nucleosides having at least a first nucleobase sequence that is at least partially complementary to at least a portion of RNA transcribed from a C3 gene.

### RELATED APPLICATIONS

[0001] The present application is a continuation of International Application No. PCT/US2023/68134, filed on Jun. 8, 2023, which claims the benefit of and priority to U.S. Provisional Patent Application No. 63/350,405, filed Jun. 8, 2022, and U.S. Provisional Application No. 63/407,428, filed Sep. 16, 2022, both of which are incorporated herein by reference in their entireties.

### SEQUENCE LISTING

[0002] The instant application contains a Sequence Listing that has been submitted electronically in ST.26 XML format and is hereby incorporated by reference in its entirety. The XML file was created on Jun. 6, 2023, is named 4690_0069I_SL and is 4590 kilobytes in size.

### FIELD

[0003] The present disclosure relates to products, and compositions, and their uses. In particular, the present disclosure relates to nucleic acid products that modulate, in particular interfere with or inhibit, complement component C3 gene expression. Embodiments of the present disclosure can therefore provide methods, compounds, and compositions for reducing expression of C3 mRNA and protein in an animal. Such methods, compounds, and compositions are useful to treat, prevent, or ameliorate complement system-associated including C3-associated disorders such as C3 glomerulopathy, Chronic obstructive pulmonary disease (COPD), paroxysmal nocturnal hemoglobinuria (PNH); age-related macular degeneration (AMD) and/or granuloma annulare (GA), warm autoimmune hemolytic anemia (wAIHA), and coronary artery disease (CAD).

### BACKGROUND

[0004] The complement system is part of the innate immune system. Compared to the adaptive immune system, it is evolutionary older and conserved across most taxa. Its function includes decorating microbes of potentially pathogenic nature (a process referred to as opsonization) and target them for destruction, which is effected by a macromolecular assembly known as the membrane attachment complex (MAC). Certain components of the complement system, once activated, contribute to chemoattraction and activation of leukocytes.

[0005] Complement activation may be triggered by various factors which all involve presence of microbes but may also involve components of the adaptive immune system such as Ig including IgM. Three main pathways of complement activation have been recognized and are referred to as classical pathway, alternative pathway and lectin pathway.

[0006] In functional terms, complement activation occurs inherently at a low level (spontaneous cleavage of C3 to yield C3a and C3b) and is reinforced in the presence of microbes via an enzymatic cascade converting inactive forms of enzymes (zymogenes) into their active counterparts. The term “convertase”, such as C3 convertase, is primarily a functional term and may refer to structurally distinct complexes. One type of C3 convertases is a complex of C3b and complement factor B (CFB, Factor B). Once formed, a C3 convertase can convert large amounts of C3 into its cleavage products C3a and C3b within short amount of time. The specific C3 convertase which is a complex of C3b and Factor B has originally been described in the context of the alternative pathway, but may form also in the context of the other two pathways. Within the alternative pathway, Factor B is also a constituent of C5 convertase, a complex which converts C5, a more downstream component of the pathway, into its active form. Besides C3 convertase, complement component C3 cleavage products also constitute C3/C5 convertase.

### Disease

[0007] The complement system is generally triggered by patterns of binding sites on surfaces. These binding sites may be constituents of a microbe or pathogen, but may also be antibodies which previously bound to any target. In the latter case, the complement system acts to reinforce the adaptive immune system. As a consequence, and in case the mentioned antibodies are autoantibodies, the complement system exacerbates an undesirable auto-immune reaction. Interfering with the complement system in such a setting is a means to treat or ameliorate autoimmune diseases. Since the complement system, more specifically C1 of the classical pathway recognizes the constant portions of antibodies, interfering with the complement system opens an avenue to generally interfering with auto-immune disorder without particular limitation. Having the that, experience tells that auto-immune disorders affect skin, joints and kidneys more frequently than other organs.

[0008] On the other hand, complement dysfunction, in the absence of autoantibodies may be a trigger of disorders as well. Also in this context it applies that, owing to the generic mechanism of the complement system, the disease amenable to treatment by an inhibitor of the complement system, more specifically by an inhibitor of complement component C3 is not particularly limited.

### Treatment

[0009] Eculizumab is a humanized monoclonal antibody targeting C5 and has been approved for PNH treatment. A murine cell line is used for its production. Eculizumab should not be used in patients with sensitivity against murine proteins. Treatment with eculizumab is expensive and costs may exceed 600,000 EUR per year for each patient.

[0010] Pegcetacoplan (Empaveli): Approved in 2021, is a 15aa peptide conjugated to PEG that binds to C3 and C3b. Thereby regulating the cleavage of C3 and the downstream effect.

[0011] There therefore remains a need for therapies to treat complement-associated diseases including complement component C3-associated diseases. One aim of this disclosure is to provide compounds, methods, and pharmaceutical compositions for the treatment of such diseases.

[0012] Double-stranded RNA (dsRNA) capable of complementarily binding expressed mRNA has been shown to block gene expression (Fire et al., 1998, Nature. 1998 Feb. 19; 391 (6669):806-1 1 and Elbashir et at., 2001, Nature. 2001 May 24; 411 (6836):494-8) by an RNA interference (RNAi) mechanism. Short dsRNAs direct gene-specific, post-transcriptional silencing in many organisms, including vertebrates, and have become a useful tool for studying gene function. RNAi is mediated by the RNA-induced silencing complex (RISC), a sequence-specific, multi-component nuclease that destroys messenger RNAs homologous to the silencing trigger loaded into the RISC complex. Interfering RNA (iRNA) such as small interfering RNA (siRNAs), antisense RNA (asRNA), and micro-RNA (miRNA) are oligonucleotides that prevent the formation of proteins by gene-silencing i.e. inhibiting gene translation of the protein through degradation of mRNA molecules. Gene-silencing agents are becoming increasingly important for therapeutic applications in medicine.

[0013] The discovery of potent gene-silencing agents with minimal, off-target effects is a complex process. Although algorithms can be used to design gene silencing triggers agents such as siRNA, there are limitations. These include a failure of the algorithms to account for the tertiary structure of the target mRNA and for the involvement of RNA binding proteins Watts & Corey. J Pathol. 226:365-379, 2023). These highly charged molecules used in pharmaceutical compositions should be capable of (i) being synthesized economically, (ii) being distributed to target tissues, (iii) entering cells, and (iv) functioning within acceptable limits of toxicity. Another aim of this disclosure is, therefore, to provide compounds, methods, and pharmaceutical compositions for the treatment of C3-associated disorders and diseases using oligomeric compounds that modulate, in particular inhibit, gene expression by RNAi.

### SUMMARY

[0014] The aforementioned problem of providing compounds and treatments having the potential of efficiently reducing the effects of C3-related diseases or disorders is solved by the present disclosure.

[0015] According to a first aspect, the present disclosure is directed to an oligomeric compound capable of inhibiting expression of complement component C3, wherein the compound comprises at least a first region of linked nucleosides having at least a first nucleobase sequence that is at least partially complementary to at least a portion of RNA transcribed from an C3 gene, wherein the first nucleobase sequence is selected from the following sequences, or a portion thereof: sequences of Table 1a (SEQ ID NOs: 1 to 250), wherein the portion optionally has a length of at least 18 nucleosides.

[0016] Particularly preferred embodiments according to the first aspect of the present disclosure relate to optimized hairpin RNAs (referred to as mxRNAs); for further details see the embodiments and their discussion further below.

[0017] Furthermore, and as disclosed further below, the disclosure also relates to double-stranded RNAs (dsRNAs). Deviant from mxRNAs, dsRNAs lack a loop connecting antisense and sense portions and therefore comprise two strands. The two strands are not covalently connected to each other, but form a duplex region where base pairing occurs.

[0018] According to a second aspect, the present disclosure is directed to nucleic acid construct comprising at least:
[0019] (a) a first nucleic acid portion that is at least partially complementary to at least a first portion of an RNA, which is transcribed from a C3 gene;
[0020] (b) a second nucleic acid portion that is at least partially complementary to at least a second portion of an RNA, which is transcribed from a C3 gene, the second portion being different from the first portion;
[0021] (c) a third nucleic acid portion that is at least partially complementary to the first nucleic acid portion of (a), so as to form a first nucleic acid duplex region therewith;
[0022] (d) a fourth nucleic acid portion that is at least partially complementary to the second nucleic acid portion of (b), so as to form a second nucleic acid duplex region therewith.

[0023] Preferred and/or exemplary features of constructs according to the second aspect of the present disclosure are as follows:
[0024] 1) they contain multiple (2 or more) at least partially double-stranded agents capable of triggering RNA interference, tied together into a single nano-structure predominantly through complementary (Watson-Crick) interactions;
[0025] 2) optionally, other (e.g.) covalent bindings may be used to build the constructs and/or add various ligands (e.g. delivery/targeting moieties such as GalNAc and or other carbohydrates, cholesterol, peptides, or small molecules, optionally attached via linkers);
[0026] 3) the constructs of the disclosure predominantly comprise chemically modified nucleotides (e.g. 2′F, 2′OMe, LNO, PNA, MOE, BNA, PMO, phosphorothioate, phosphorodithioate, etc.), mostly (but not only) to increase resistance to nucleases;
[0027] 4) the constructs contain “fragile” components (e.g. chemical linkers, unmodified nucleotides, etc.), which allow the constructs to disassemble upon exposure to certain biologic environments (e.g. exposure to extra- and/or intra-cellular fluids); particular examples could be (but not limited): a) cleavage of the oligo backbone by nucleases in the sites with non-modified nucleotides; b) cleavage of the chemical linkage due to the change of pH (e.g. in endosomes);
[0028] 5) disassembly upon exposure to the certain biologic environments releases the active components (e.g. the at least partially double-stranded agents capable of triggering RNA interference) to modulate (up- or down-regulate, optionally down-regulate) target gene expression in cells/organisms;
[0029] 6) the constructs can be used to modulate, optionally down-regulate or silence gene expression, to study gene function, or to treat various diseases associated with the target genes to be down regulated.

[0030] According to a third aspect, the present disclosure is directed to a composition comprising an oligomeric compound according to the first aspect and/or a nucleic acid construct according to the second aspect, and a physiologically acceptable excipient.

[0031] According to a fourth aspect, the present disclosure is directed to a pharmaceutical composition comprising an oligomeric compound according to the first aspect and/or a nucleic acid construct according to the second aspect.

[0032] According to a fifth aspect, the present disclosure is directed to an oligomeric compound according to the first aspect and/or a nucleic acid construct according to the second aspect, for use in human or veterinary medicine or therapy.

[0033] According to a sixth aspect, the present disclosure is directed to an oligomeric compound according to the first aspect and/or a nucleic acid construct according to the second aspect, for use in a method of treating a disease or disorder.

[0034] According to a seventh aspect, the present disclosure is directed to a method of treating a disease or disorder comprising administration of an oligomeric compound according to the first aspect and/or a nucleic acid construct according to the second aspect, to an individual in need of treatment.

[0035] According to an eighth aspect, the present disclosure is directed to a use of an oligomeric compound according to the first aspect or according to the second aspect, for use in research as a gene function analysis tool.

[0036] According to a ninth aspect, the present disclosure is directed to a use of an oligomeric compound according to the first aspect or the second aspect in the manufacture of a medicament for a treatment of a disease or disorder.

### Effects Achieved by the Oligomeric Compounds

[0037] Due to the use of the oligomeric compounds according to the present disclosure, a significant reduction of gene expression of complement component C3 in vivo and in vitro can be achieved as e.g. shown in the examples disclosed herein. The reduction is clearly over 50%; in some examples between 70% and even over 80%.

[0038] Furthermore, it was surprisingly found that, in certain embodiments, the mentioned effects are achieved by using oligomeric compounds according to the present disclosure for inhibiting the expression of C3 in the form of shRNA constructs, having a reduced length of e.g. 33 nucleosides, also called “mxRNA”, compared to conventional shRNA molecules having greater lengths. This can e.g. make a synthesis of shRNA molecules more efficient, because less units are needed.

[0039] For certain oligomeric compounds according to the present disclosure, being in the form of shRNA constructs for inhibiting the expression of C3, it was surprisingly found out that the aforementioned effects can be achieved by using short sense strands within the shRNA having a length of optionally 14 nucleosides which is shorter than the length of the sense strands in conventional shRNA molecules.

[0040] Due to their successful C3 knockdown of the disclosed compounds in their mxRNA form it is also plausible that they are functioning, the same way as a part of muRNA constructs as disclosed herein. This is in particular because, without wishing to be bound by a particular theory, it is assumed that the active species are the same.

### BRIEF DESCRIPTION OF THE FIGURES

[0041] FIG. 1 shows single dose screening results (primary screening) of certain C3 mxRNA compounds according to the present disclosure (primary screening) and their activity in inhibiting C3 gene expression.

[0042] FIG. 2 shows dose curves of 27 C3 mxRNA compounds according to the present disclosure from secondary screening and their activity in inhibiting C3 gene expression.

[0043] FIG. 3 shows dose curves of C3 mxRNA lead compounds for preparation in vivo and their dose curves.

[0044] FIG. 4 shows a study schedule and study information for a study relating to C3 targeting mxRNA leads for candidate dose and duration response study in humanized liver-uPA-SCID mice (PXB) model.

[0045] FIG. 5 shows results of the C3 targeting mxRNA construct study for dose and duration response in humanized liver-uPA-SCID mice (PXB).

[0046] FIG. 6 shows a study schedule and study information for a study relating to an evaluation of a duration effect of human complement C3 targeting mxRNA, in the humanized liver-uPA-SCID mice (PXB) model.

[0047] FIG. 7 shows results of the study of an evaluation of a duration effect of human complement C3 targeting mxRNA, in the humanized liver-uPA-SCID mice (PXB) model.

### DETAILED DESCRIPTION AND EMBODIMENTS

[0048] Further embodiments (items) of the present disclosure are described below by way of example only. These examples represent the best ways of putting the disclosure into practice that are currently known to the applicant although they are not the only ways in which this could be achieved.

[0049] It will be understood that the benefits and advantages described herein may relate to one embodiment or may relate to several embodiments. The embodiments are not limited to those that solve any or all of the stated problems or those that have any or all of the stated benefits and advantages. Embodiments labelled “optionally” or “optional” are not intended to limit the scope of the claims but to show optional embodiments of the present disclosure.

[0050] Features of different aspects and embodiments of the disclosure may be combined as appropriate, as would be apparent to a skilled person, and may be combined with any of the aspects of the disclosure.

### Definitions

[0051] The following definitions pertain to the disclosure throughout. In many instances, the definitions, in addition to the respective definition as such, provide non-exhaustive listings of possible implementations, which amount to optional embodiments.

[0052] Unless specific definitions are provided, the nomenclature used in connection with, and the procedures and techniques of, analytical chemistry, synthetic organic chemistry, and medicinal and pharmaceutical chemistry described herein are those well-known and commonly used in the art. Standard techniques may be used for chemical synthesis, and chemical analysis. Certain such techniques and procedures may be found for example in “Carbohydrate Modifications in Antisense Research” Edited by Sangvi and Cook, American Chemical Society, Washington D.C., 1994; “Remington's Pharmaceutical Sciences,” Mack Publishing Co., Easton, Pa., 21st edition, 2005; and “Antisense Drug Technology, Principles, Strategies, and Applications” Edited by Stanley T. Crooke, CRC Press, Boca Raton, Florida; and Sambrook et al., “Molecular Cloning, A laboratory Manual,” 2nd Edition, Cold Spring Harbor Laboratory Press, 1989, which are hereby incorporated by reference for any purpose. Where permitted, all patents, applications, published applications and other publications and other data referred to throughout in the disclosure are incorporated by reference herein in their entirety.

[0053] Unless otherwise indicated, the following terms have the following meanings:

[0054] As used herein, “excipient” means any compound or mixture of compounds that is added to a composition as provided herein that is suitable for delivery of an oligomeric compound.

[0055] As used herein, “nucleoside” means a compound comprising a nucleobase moiety and a sugar moiety. Nucleosides include, but are not limited to, naturally occurring nucleosides (as found in DNA and RNA) and modified nucleosides. Nucleosides may be linked to a phosphate moiety, phosphate-linked nucleosides also being referred to as “nucleotides”. The structural features and/or the lengths of oligomeric compounds or nucleic acid constructs disclosed herein is expressed in terms of “nucleosides” or “nucleotides”.

[0056] As used herein, “chemical modification” or “chemically modified” means a chemical difference in a compound when compared to a naturally occurring counterpart. Chemical modifications of oligonucleotides include nucleoside modifications (including sugar moiety modifications and nucleobase modifications) and internucleoside linkage modifications. In reference to an oligonucleotide, chemical modification does not include differences only in nucleobase sequence.

[0057] As used herein, “furanosyl” means a structure comprising a 5-membered ring comprising four carbon atoms and one oxygen atom.

[0058] As used herein, “naturally occurring sugar moiety” means a ribofuranosyl as found in naturally occurring RNA or a deoxyribofuranosyl as found in naturally occurring DNA. A “naturally occurring sugar moiety” as referred to herein is also termed as an “unmodified sugar moiety”. In particular, such a “naturally occurring sugar moiety” or an “unmodified sugar moiety” as referred to herein has a —H (DNA sugar moiety) or —OH (RNA sugar moiety) at the 2′-position of the sugar moiety, especially a —H (DNA sugar moiety) at the 2′-position of the sugar moiety.

[0059] As used herein, “sugar moiety” means a naturally occurring sugar moiety or a modified sugar moiety of a nucleoside. As used herein, “modified sugar moiety,” means a substituted sugar moiety or a sugar surrogate.

[0060] As used herein, “substituted sugar moiety” means a furanosyl that has been substituted. Substituted sugar moieties include, but are not limited to furanosyls comprising substituents at the 2′-position, the 3′-position, the 5′-position and/or the 4′-position. Certain substituted sugar moieties are bicyclic sugar moieties.

[0061] As used herein, “2′-substituted sugar moiety” means a furanosyl comprising a substituent at the 2′-position other than H or OH. Unless otherwise indicated, a 2′-substituted sugar moiety is not a bicyclic sugar moiety (i.e., the 2′-substituent of a 2′-substituted sugar moiety does not form a bridge to another atom of the furanosyl ring).

[0062] As used herein, “MOE” means —OCH2CH2OCH3.

[0063] As used herein, “2′-F nucleoside” refers to a nucleoside comprising a sugar comprising fluorine at the 2′ position. Unless otherwise indicated, the fluorine in a 2′-F nucleoside is in the ribo position (replacing the OH of a natural ribose). Duplexes of uniformly modified 2′-fluorinated (ribo) oligonucleotides hybridized to RNA strands are not RNase H substrates while the analogues retain RNase H activity.

[0064] As used herein the term “sugar surrogate” means a structure that does not comprise a furanosyl and that is capable of replacing the naturally occurring sugar moiety of a nucleoside, such that the resulting nucleoside sub-units are capable of linking together and/or linking to other nucleosides to form an oligomeric compound which is capable of hybridizing to a complementary oligomeric compound. Such structures include rings comprising a different number of atoms than furanosyl (e.g., 4, 6, or 7-membered rings); replacement of the oxygen of a furanosyl with a non-oxygen atom (e.g., carbon, sulfur, or nitrogen); or both a change in the number of atoms and a replacement of the oxygen. Such structures may also comprise substitutions corresponding to those described for substituted sugar moieties (e.g., 6-membered carbocyclic bicyclic sugar surrogates optionally comprising additional substituents). Sugar surrogates also include more complex sugar replacements (e.g., the non-ring systems of peptide nucleic acid). Sugar surrogates include without limitation morpholinos, cyclohexenyls and cyclohexitols.

[0065] As used herein, “bicyclic sugar moiety” means a modified sugar moiety comprising a 4 to 7 membered ring (including but not limited to a furanosyl) comprising a bridge connecting two atoms of the 4 to 7 membered ring to form a second ring, resulting in a bicyclic structure. In certain embodiments, the 4 to 7 membered ring is a sugar ring. In certain embodiments, the 4 to 7 membered ring is a furanosyl. In certain such embodiments, the bridge connects the 2′-carbon and the 4′-carbon of the furanosyl.

[0066] As used herein, “nucleotide” means a nucleoside further comprising a phosphate linking group. As used herein, “linked nucleosides” may or may not be linked by phosphate linkages and thus includes, but is not limited to “linked nucleotides.” As used herein, “linked nucleosides” are nucleosides that are connected in a continuous sequence (i.e. no additional nucleosides are present between those that are linked).

[0067] As used herein, “nucleobase” means a group of atoms that can be linked to a sugar moiety to create a nucleoside that is capable of incorporation into an oligonucleotide, and wherein the group of atoms is capable of bonding, more specifically hydrogen bonding, with a complementary naturally occurring nucleobase of another oligonucleotide or nucleic acid. Nucleobases may be naturally occurring or may be modified.

[0068] As used herein the terms, “unmodified nucleobase” or “naturally occurring nucleobase” means the naturally occurring heterocyclic nucleobases of RNA or DNA: the purine bases adenine (A) and guanine (G), and the pyrimidine bases thymine (T), cytosine (C) (including 5-methyl C), and uracil (U).

[0069] As used herein, “modified nucleobase,” means any nucleobase that is not a naturally occurring nucleobase.

[0070] As used herein, “modified nucleoside” means a nucleoside comprising at least one chemical modification compared to naturally occurring RNA or DNA nucleosides. Modified nucleosides can comprise a modified sugar moiety and/or a modified nucleobase.

[0071] As used herein, “bicyclic nucleoside” or “BNA” means a nucleoside comprising a bicyclic sugar moiety.

[0072] As used herein, “locked nucleic acid nucleoside” or “LNA” means a nucleoside comprising a bicyclic sugar moiety comprising a 4′-CH2-O-2′bridge.

[0073] As used herein, “2′-substituted nucleoside” means a nucleoside comprising a substituent at the 2′-position of the sugar moiety other than H or OH. Unless otherwise indicated, a 2′-substituted nucleoside is not a bicyclic nucleoside.

[0074] As used herein, “deoxynucleoside” means a nucleoside comprising 2′-H furanosyl sugar moiety, as found in naturally occurring deoxyribonucleosides (DNA). In certain embodiments, a 2′-deoxynucleoside may comprise a modified nucleobase or may comprise an RNA nucleobase (e.g., uracil).

[0075] As used herein, “oligonucleotide” means a compound comprising a plurality of linked nucleosides. In certain embodiments, an oligonucleotide comprises one or more unmodified ribonucleosides (RNA) and/or unmodified deoxyribonucleosides (DNA) and/or one or more modified nucleosides.

[0076] As used herein, “modified oligonucleotide” means an oligonucleotide comprising at least one modified nucleoside and/or at least one modified internucleoside linkage.

[0077] Optionally modified internucleoside linkages are those, which confer increased stability as compared to the naturally occurring phosphodiesters. “Stability” refers in particular to stability against hydrolysis including enzyme-catalyzed hydrolysis, enzymes including exonucleases and endonucleases.

[0078] Optionally positions for such modified internucleoside linkages include the termini and the hairpin loop of single-stranded oligomeric compounds of the disclosure. For example, the internucleoside linkages connecting first and second nucleoside and second and third nucleoside counting from the 5′ terminus, and/or the internucleoside linkages connecting first and second nucleoside and second and third nucleoside counting from the 3′ terminus are modified. In addition, a linkage connecting the terminal nucleoside of the 3′ terminus with a ligand, such as GalNAc, may be modified.

[0079] As discussed above, optional positions are in the hairpin loop of the single-stranded oligomeric compounds. In particular, all linkages, all but one linkages or the majority of linkages in the hairpin loop are modified. As used herein, “linkages in the hairpin loop” designates the linkages between nucleosides, which are not engaged in base pairing. For example, in a hairpin loop consisting of five nucleosides, there are four linkages between nucleosides which are not engaged in base pairing. Optionally, the term “linkages in the hairpin loop” also extends to the linkages connecting the stem to the loop, i.e., those linkages which connect a base-paired nucleoside to a non-based paired nucleoside. Generally, there are two such positions in hairpins and mxRNAs in accordance with the disclosure.

[0080] Most optional is that modified internucleoside linkages are at both termini and in the hairpin loop.

[0081] As used herein, “linkage” or “linking group” means a group of atoms that link together two or more other groups of atoms.

[0082] As used herein “internucleoside linkage” means a covalent linkage between adjacent nucleosides in an oligonucleotide.

[0083] As used herein “naturally occurring internucleoside linkage” means a 3′ to 5′ phosphodiester linkage.

[0084] As used herein, “modified internucleoside linkage,” means any internucleoside linkage other than a naturally occurring internucleoside linkage. In particular, a “modified internucleoside linkage” as referred to herein can include a modified phosphorous linking group such as a phosphorothioate or phosphorodithioate internucleoside linkage.

[0085] As used herein, “terminal internucleoside linkage” means the linkage between the last two nucleosides of an oligonucleotide or defined region thereof.

[0086] As used herein, “phosphorus linking group” means a linking group comprising a phosphorus atom and can include naturally occurring phosphorous linking groups as present in naturally occurring RNA or DNA, such as phosphodiester linking groups, or modified phosphorous linking groups that are not generally present in naturally occurring RNA or DNA, such as phosphorothioate or phosphorodithioate linking groups. Phosphorus linking groups can therefore include without limitation, phosphodiester, phosphorothioate, phosphorodithioate, phosphonate, methylphosphonate, phosphoramidate, phosphorothioamidate, thionoalkylphosphonate, phosphotriesters, thionoalkylphosphotriester and boranophosphate.

[0087] As used herein, “internucleoside phosphorus linking group” means a phosphorus linking group that directly links two nucleosides.

[0088] As used herein, “oligomeric compound” means a polymeric structure comprising two or more substructures. In certain embodiments, an oligomeric compound comprises an oligonucleotide, such as a modified oligonucleotide. In certain embodiments, an oligomeric compound further comprises one or more conjugate groups and/or terminal groups and/or ligands. In certain embodiments, an oligomeric compound consists of an oligonucleotide. In certain embodiments, an oligomeric compound comprises a backbone of one or more linked monomeric sugar moieties, where each linked monomeric sugar moiety is directly or indirectly attached to a heterocyclic base moiety. In certain embodiments, oligomeric compounds may also include monomeric sugar moieties that are not linked to a heterocyclic base moiety, thereby providing abasic sites. Oligomeric compounds may be defined in terms of a nucleobase sequence only, i.e., by specifying the sequence of A, G, C, U (or T). In such a case, the structure of the sugar-phosphate backbone is not particularly limited and may or may not comprise modified sugars and/or modified phosphates. On the other hand, oligomeric compounds may be more comprehensively defined, i.e., by specifying not only the nucleobase sequence, but also the structure of the backbone, in particular the modification status of the sugars (unmodified, 2′-OMe modified, 2′-F modified etc.) and/or of the phosphates. An mxRNA is one non-limiting example for an oligomeric compound.

[0089] As used herein, “nucleic acid construct” or “construct” refers to an assembly of two or more, such as four oligomeric compounds. The oligomeric compounds may be connected to each other by covalent bonds such phosphodiester bonds as they occur in naturally occurring nucleic acids or modified versions thereof as disclosed herein, or by non-covalent bonds such as hydrogen bonds, optionally hydrogen bonds between nucleobases such as Watson-Crick base pairing. In certain embodiments, optional is that a construct comprises four oligomeric compounds, two of which are connected covalently, thereby giving rise to two nucleic acid strands which nucleic acid strands are bound to each other by hydrogen bonds. Complementarity between the strand may be throughout, but is not necessarily so. In particular, exemplary embodiments provide for an antisense strand targeting a first region of C3 mRNA to be connected covalently with a sense strand of another C3-targeting double stranded RNA molecule, and of the antisense strand of the C3 mRNA-targeting double stranded RNA molecule to be connected covalently to a sense strand of the other C3 mRNA-targeting double stranded RNA molecule. Since antisense and sense strands of the parent single-target-directed RNA molecules do not need to have the same length and optionally do not have the same length with antisense portions being longer than sense portions, an optional construct of the disclosure contains a central region where the 3′ regions of the antisense portions of the parent single-target-directed RNA molecules face each other. In that region generally no or only partial base pairing will occur, while full complementarity is not excluded. Otherwise, where antisense and sense portions of the respective parent RNA molecules face each other; there is complementarity, optionally full complementarity or 1 or 2 mismatches. An muRNA is non-limiting example for a nucleic acid construct.

[0090] The term “strand” has its art-established meaning and refers to a plurality of linked nucleosides, the linker not being particularly limited, but including phosphodiesters and variants thereof as disclosed herein. A strand may also be viewed as a plurality of linked nucleotides in which case the linker would be a covalent bond.

[0091] As used herein, “terminal group” means one or more atom attached to either, or both, the 3′ end or the 5′ end, also called “terminus” of an oligonucleotide. In certain embodiments, a terminal group comprises one or more terminal group nucleosides, whereas a “terminal nucleoside”/“terminal nucleotide” is only one nucleotide at the respective end (5′ end or 3′ end).

[0092] As used herein, “conjugate” or “conjugate group” means an atom or group of atoms bound to an oligonucleotide or oligomeric compound. In certain embodiments, a conjugate group links a ligand to a modified oligonucleotide or oligomeric compound. In general, conjugate groups can modify one or more properties of the compound to which they are attached, including, but not limited to pharmacodynamic, pharmacokinetic, binding, absorption, cellular distribution, cellular uptake, and charge and/or clearance properties.

[0093] As used herein, “conjugate linker” or “linker” in the context of a conjugate group means a portion of a conjugate group comprising any atom or group of atoms and which covalently link an oligonucleotide to another portion of the conjugate group. In certain embodiments, the point of attachment on the oligomeric compound is the 3′-oxygen atom of the 3′-hydroxyl group of the 3′ terminal nucleoside of the oligonucleotide. In certain embodiments, the point of attachment on the oligomeric compound is the 5′-oxygen atom of the 5′-hydroxyl group of the 5′ terminal nucleoside of the oligonucleotide. In certain embodiments, the bond for forming attachment to the oligomeric compound is a cleavable bond. In certain such embodiments, such cleavable bond constitutes all or part of a cleavable moiety.

[0094] In certain embodiments, conjugate groups comprise a cleavable moiety (e.g., a cleavable bond or cleavable nucleoside) and ligand portion that can comprise one or more ligands, such as a carbohydrate cluster portion, such as an N-Acetyl-Galactosamine, also referred to as “GalNAc”, cluster portion. In certain embodiments, the carbohydrate cluster portion is identified by the number and identity of the ligand. For example, in certain embodiments, the carbohydrate cluster portion comprises 2 GalNAc groups. For example, in certain embodiments, the carbohydrate cluster portion comprises 3 GalNAc groups and this is particularly optional. In certain embodiments, the carbohydrate cluster portion comprises 4 GalNAc groups. Such ligand portions are attached to an oligomeric compound via a cleavable moiety, such as a cleavable bond or cleavable nucleoside. The ligands can be arranged in a linear or branched configuration, such as a biantennary or triantennary configurations. An optional carbohydrate cluster has the following formula:

[chemical structure]

wherein in the structural formula one, two, or three phosphodiester linkages can also be substituted by phosphorothioate linkages.

[0095] As used herein, “cleavable moiety” means a bond or group that is capable of being cleaved under physiological conditions. In certain embodiments, a cleavable moiety is cleaved inside a cell or sub-cellular compartments, such as an endosome or lysosome. In certain embodiments, a cleavable moiety is cleaved by endogenous enzymes, such as nucleases. In certain embodiments, a cleavable moiety comprises a group of atoms having one, two, three, four, or more than four cleavable bonds. In certain embodiments, a cleavable moiety is a phosphodiester linkage.

[0096] As used herein, “cleavable bond” means any chemical bond capable of being broken.

[0097] As used herein, “carbohydrate cluster” means a compound having one or more carbohydrate residues attached to a linker group.

[0098] As used herein, “modified carbohydrate” means any carbohydrate having one or more chemical modifications relative to naturally occurring carbohydrates.

[0099] As used herein, “carbohydrate derivative” means any compound which may be synthesized using a carbohydrate as a starting material or intermediate.

[0100] As used herein, “carbohydrate” means a naturally occurring carbohydrate, a modified carbohydrate, or a carbohydrate derivative. A carbohydrate is a biomolecule including carbon (C), hydrogen (H) and oxygen (O) atoms. Carbohydrates can include monosaccharide, disaccharides, trisaccharides, tetrasaccharides, oligosaccharides or polysaccharides, such as one or more galactose moieties, one or more lactose moieties, one or more N-Acetyl-Galactosamine moieties, and/or one or more mannose moieties. A particularly optionalcarbohydrate is N-Acetyl-Galactosamine.

[0101] As used herein, “strand” means an oligomeric compound comprising linked nucleosides.

[0102] As used herein, “single strand” or “single-stranded” means an oligomeric compound comprising linked nucleosides that are connected in a continuous sequence without a break there between. Such single strands may include regions of sufficient self-complementarity so as to be capable of forming a stable self-duplex in a hairpin structure.

[0103] As used herein, “hairpin” means a single stranded oligomeric compound that includes a duplex formed by base pairing between sequences in the strand that are self-complementary and opposite in directionality.

[0104] As used herein, “hairpin loop” means an unpaired loop of linked nucleosides in a hairpin that is created as a result of hybridization of the self-complementary sequences. The resulting structure looks like a loop or a U-shape.

[0105] In particular, short hairpin RNA, also denoted as shRNA, comprises a duplex region and a loop connecting the regions forming the duplex. The end of the duplex region, which does not carry the loop, may be blunt-ended or carry (a) 3′ and/or (a) 5′ overhang(s). Optional are blunt-ended constructs. The term “shRNA” is more generic than “mxRNA”, as defined below, and may include compounds in which the loop is not or not exclusively formed out of an antisense strand. In particular, shRNA includes an antisense strand, also called guide strand, being complementary to a region of a target RNA, and a sense strand, i.e. a passenger strand, being substantially complementary to the antisense strand. More particularly, the antisense strand and the sense strand within the shRNA are directly linked, e.g. by a phosphate or a phosphorothioate, or linked by a third portion of linked nucleosides forming the loop, which means that the 3′ end of the antisense strand is linked to the 5′ end of the sense strand via covalent bonding over several other groups. Such direct linkage does not include a gap or nick.

[0106] As used herein, “directionality” means the end-to-end chemical orientation of an oligonucleotide based on the chemical convention of numbering of carbon atoms in the sugar moiety meaning that there will be a 5′-end defined by the 5′ carbon of the sugar moiety, and a 3′-end defined by the 3′ carbon of the sugar moiety. In a duplex or double stranded oligonucleotide, the respective strands run in opposite 5′ to 3′ directions to permit base pairing between them.

[0107] As used herein, “duplex”, or also abbreviated as “dup”, means two or more complementary strand regions, or strands, of an oligonucleotide or oligonucleotides, hybridized together by way of non-covalent, sequence-specific interaction there between. Most commonly, the hybridization in the duplex will be between nucleobases adenine (A) and thymine (T), and/or (A) adenine and uracil (U), and/or guanine (G) and cytosine (C). The duplex may be part of a single stranded structure, wherein self-complementarity leads to hybridization, or as a result of hybridization between respective strands in a double stranded construct.

[0108] As used herein, “double strand” or “double stranded” means a pair of oligomeric compounds that are hybridized to one another. In certain embodiments, a double-stranded oligomeric compound comprises a first and a second oligomeric compound.

[0109] As used herein, “expression” means the process by which a gene ultimately results in a protein. Expression includes, but is not limited to, transcription, post-transcriptional modification (e.g., splicing, polyadenylation, addition of 5′-cap), and translation.

[0110] As used herein, “transcription” or “transcribed” refers to the first of several steps of DNA based gene expression in which a target sequence of DNA is copied into RNA (especially mRNA) by the enzyme RNA polymerase. During transcription, a DNA sequence is read by an RNA polymerase, which produces a complementary, antiparallel RNA sequence called a primary transcript.

[0111] As used herein, “target sequence” means a sequence to which an oligomeric compound is intended to hybridize to result in a desired activity with respect to C3 expression. Oligonucleotides have sufficient complementarity to their target sequences to allow hybridization under physiological conditions.

[0112] As used herein, “nucleobase complementarity” or “complementarity” when in reference to nucleobases means a nucleobase that is capable of base pairing with another nucleobase. For example, in DNA, adenine (A) is complementary to thymine (T). For example, in RNA, adenine (A) is complementary to uracil (U). In both DNA and RNA, guanine (G) is complementary to cytosine (C). In certain embodiments, complementary nucleobase means a nucleobase of an oligomeric compound that is capable of base pairing with a nucleobase of its target sequence. For example, if a nucleobase at a certain position of an oligomeric compound is capable of hydrogen bonding with a nucleobase at a certain position of a target sequence, then the position of hydrogen bonding between the oligomeric compound and the target sequence is considered complementary at that nucleobase pair. Nucleobases comprising certain modifications may maintain the ability to pair with a counterpart nucleobase and thus, are still capable of nucleobase complementarity.

[0113] As used herein, “non-complementary” in reference to nucleobases means a pair of nucleobases that do not form hydrogen bonds with one another.

[0114] As used herein, “complementary” in reference to oligomeric compounds (e.g., linked nucleosides, oligonucleotides) means the capacity of such oligomeric compounds or regions thereof to hybridize to a target sequence, or to a region of the oligomeric compound itself, through nucleobase complementarity.

[0115] Complementary oligomeric compounds need not have nucleobase complementarity at each nucleoside. Rather, some mismatches are tolerated. In certain embodiments, complementary oligomeric compounds or regions are complementary at 70% of the nucleobases (70% complementary). In certain embodiments, complementary oligomeric compounds or regions are 80%> complementary. In certain embodiments, complementary oligomeric compounds or regions are 90%> complementary. In certain embodiments, complementary oligomeric compounds or regions are at least 95% complementary. In certain embodiments, complementary oligomeric compounds or regions are 100% complementary.

[0116] As used herein, “self-complementarity” in reference to oligomeric compounds means a compound that may fold back on itself, creating a duplex as a result of nucleobase hybridization of internal complementary strand regions. Depending on how close together and/or how long the strand regions are, then the compound may form hairpin loops, junctions, bulges or internal loops.

[0117] As used herein, “mismatch” means a nucleobase of an oligomeric compound that is not capable of pairing with a nucleobase at a corresponding position of a target sequence, or at a corresponding position of the oligomeric compound itself when the oligomeric compound hybridizes as a result of self-complementarity, when the oligomeric compound and the target sequence and/or self-complementary regions of the oligomeric compound, are aligned.

[0118] As used herein, “hybridization” means the pairing of complementary oligomeric compounds (e.g., an oligomeric compound and its target sequence). While not limited to a particular mechanism, the most common mechanism of pairing involves hydrogen bonding, which may be Watson-Crick, Hoogsteen or reversed Hoogsteen hydrogen bonding, between complementary nucleobases.

[0119] As used herein, “specifically hybridizes” means the ability of an oligomeric compound to hybridize to one nucleic acid site with greater affinity than it hybridizes to another nucleic acid site.

[0120] As used herein, “fully complementary” in reference to an oligomeric compound or region thereof means that each nucleobase of the oligomeric compound or region thereof is capable of pairing with a nucleobase of a complementary nucleic acid target sequence or a self-complementary region of the oligomeric compound. Thus, a fully complementary oligomeric compound or region thereof comprises no mismatches or unhybridized nucleobases with respect to its target sequence or a self-complementary region of the oligomeric compound.

[0121] As used herein, “percent complementarity” means the percentage of nucleobases of an oligomeric compound that are complementary to an equal-length portion of a target nucleic acid. Percent complementarity is calculated by dividing the number of nucleobases of the oligomeric compound that are complementary to nucleobases at corresponding positions in the target nucleic acid by the total length of the oligomeric compound.

[0122] As used herein, “percent identity” means the number of nucleobases in a first nucleic acid that are the same type (independent of chemical modification) as nucleobases at corresponding positions in a second nucleic acid, divided by the total number of nucleobases in the first nucleic acid.

[0123] As used herein, “modulation” means a change of amount or quality of a molecule, function, or activity when compared to the amount or quality of a molecule, function, or activity prior to modulation. For example, modulation includes the change, either an increase (stimulation or induction) or a decrease (inhibition or reduction) in gene expression.

[0124] As used herein, “type of modification” in reference to a nucleoside or a nucleoside of a “type” means the chemical modification of a nucleoside and includes modified and unmodified nucleosides. Accordingly, unless otherwise indicated, a “nucleoside having a modification of a first type” may be an unmodified nucleoside.

[0125] As used herein, “differently modified” mean chemical modifications or chemical substituents that are different from one another, including absence of modifications. Thus, for example, a MOE nucleoside and an unmodified naturally occurring RNA nucleoside are “differently modified,” even though the naturally occurring nucleoside is unmodified. Likewise, DNA and RNA oligonucleotides are “differently modified,” even though both are naturally occurring unmodified nucleosides. Nucleosides that are the same but for comprising different nucleobases are not differently modified. For example, a nucleoside comprising a 2′-OMe modified sugar moiety and an unmodified adenine nucleobase and a nucleoside comprising a 2′-OMe modified sugar moiety and an unmodified thymine nucleobase are not differently modified.

[0126] As used herein, “the same type of modifications” refers to modifications that are the same as one another, including absence of modifications. Thus, for example, two unmodified RNA nucleosides have “the same type of modification,” even though the RNA nucleosides are unmodified. Such nucleosides having the same type modification may comprise different nucleobases.

[0127] As used herein, “region” or “regions”, or “portion” or “portions”, mean a plurality of linked nucleosides that have a function or character as defined herein, in particular with reference to the claims and definitions as provided herein. Typically, such regions or portions comprise at least 10, at least 11, at least 12 or at least 13 linked nucleosides. For example, such regions can comprise 13 to 20 linked nucleosides, such as 13 to 16 or 18 to 20 linked nucleosides. Typically, a first region as defined herein consists essentially of 18 to 20 nucleosides and a second region as defined herein consists essentially of 13 to 16 linked nucleosides.

[0128] As used herein, “pharmaceutically acceptable carrier or diluent” means any substance suitable for use in administering to an animal. In certain embodiments, a pharmaceutically acceptable carrier or diluent is sterile saline. In certain embodiments, such sterile saline is pharmaceutical grade saline.

[0129] As used herein, “substituent” and “substituent group,” means an atom or group that replaces the atom or group of a named parent compound. For example a substituent of a modified nucleoside is any atom or group that differs from the atom or group found in a naturally occurring nucleoside (e.g., a modified 2′-substituent is any atom or group at the 2′-position of a nucleoside other than H or OH). Substituent groups can be protected or unprotected. In certain embodiments, compounds of the present disclosure have substituents at one or at more than one position of the parent compound. Substituents may also be further substituted with other substituent groups and may be attached directly or via a linking group such as oxygen or an alkyl or hydrocarbyl group to a parent compound.

[0130] Such substituents can be present as the modification on the sugar moiety, in particular a substituent present at the 2′-position of the sugar moiety. Unless otherwise indicated, groups amenable for use as substituents include without limitation, one or more of halo, hydroxyl, alkyl, alkenyl, alkynyl, acyl, carboxyl, alkoxy, alkoxyalkylene and amino substituents. Certain substituents as described herein can represent modifications directly attached to a ring of a sugar moiety (such as a halo, such as fluoro, directly attached to a sugar ring), or a modification indirectly linked to a ring of a sugar moiety by way of an oxygen linking atom that itself is directly linked to the sugar moiety (such as an alkoxyalkylene, such as methoxyethylene, linked to an oxygen atom, overall providing an MOE substituent as described herein attached to the 2′-position of the sugar moiety).

[0131] As used herein, “alkyl,” as used herein, means a saturated straight or branched monovalent C1-6 hydrocarbon radical, with methyl being a most optional alkyl as a substituent at the 2′-position of the sugar moiety. The alkyl group typically attaches to an oxygen linking atom at the 2′-position of the sugar, therefore, overall providing a —Oalkyl substituent, such as an —OCH3 substituent, on a sugar moiety of an oligomeric compound according to the present disclosure. This will be well understood be a person skilled in the art.

[0132] As used herein, “alkylene” means a saturated straight or branched divalent hydrocarbon radical of the general formula -CnH2n- where n is 1-6. Methylene or ethylene are optional alkylenes.

[0133] As used herein, “alkenyl” means a straight or branched unsaturated monovalent C2-6 hydrocarbon radical, with ethenyl or propenyl being most optional alkenyls as a substituent at the 2′-position of the sugar moiety. As will be well understood in the art, the degree of unsaturation that is present in an alkenyl radical is the presence of at least one carbon to carbon double bond. The alkenyl group typically attaches to an oxygen linking atom at the 2′-position of the sugar, therefore, overall providing a —Oalkenyl substituent, such as an —OCH2CH═CH2 substituent, on a sugar moiety of an oligomeric compound according to the present disclosure. This will be well understood be a person skilled in the art.

[0134] As used herein, “alkynyl” means a straight or branched unsaturated C2-6 hydrocarbon radical, with ethynyl being a most optional alkynyl as a substituent at the 2′-position of the sugar moiety. As will be well understood in the art, the degree of unsaturation that is present in an alkynyl radical is the presence of at least one carbon to carbon triple bond. The alkynyl group typically attaches to an oxygen linking atom at the 2′-position of the sugar, therefore, overall providing a —Oalkynyl substituent on a sugar moiety of an oligomeric compound according to the present disclosure. This will be well understood be a person skilled in the art.

[0135] As used herein, “carboxyl” is a radical having a general formula —CO2H.

[0136] As used herein, “acyl” means a radical formed by removal of a hydroxyl group from a carboxyl radical as defined herein and has the general Formula —C(O)—X where X is typically C1-6 alkyl.

[0137] As used herein, “alkoxy” means a radical formed between an alkyl group, such as a C1-6 alkyl group, and an oxygen atom wherein the oxygen atom is used to attach the alkoxy group either to a parent molecule (such as at the 2′-position of a sugar moiety), or to another group such as an alkylene group as defined herein. Examples of alkoxy groups include without limitation, methoxy, ethoxy, propoxy, isopropoxy, n-butoxy, sec-butoxy and tert-butoxy. Alkoxy groups as used herein may optionally include further substituent groups.

[0138] As used herein, alkoxyalkylene means an alkoxy group as defined herein that is attached to an alkylene group also as defined herein, and wherein the oxygen atom of the alkoxy group attaches to the alkylene group and the alkylene attaches to a parent molecule. The alkylene group typically attaches to an oxygen linking atom at the 2′-position of the sugar, therefore, overall providing a —Oalkylenealkoxy substituent, such as an —OCH2CH2OCH3 substituent, on a sugar moiety of an oligomeric compound according to the present disclosure. This will be well understood by a person skilled in the art and is generally referred to as an MOE substituent as defined herein and as known in the art.

[0139] As used herein, “amino” includes primary, secondary and tertiary amino groups.

[0140] As used herein, “halo” and “halogen,” mean an atom selected from fluorine, chlorine, bromine and iodine.

[0141] As used herein, the term “mxRNA” is in particular understood as defined in WO 2020/044186 A2, which is incorporated by reference herein in its entirety. In particular, an mxRNA is a hairpin-shaped RNA molecule consisting of an antisense portion (also referred to as the guide strand) and a sense portion (also referred to the passenger strand). The mxRNA comprises duplex region and a hairpin loop, wherein the mxRNA has an approximate length of about 34 nucleotides. The duplex region comprises a region in which parts of the antisense portion and substantially the entire sense portion, typically 14 or 15 nucleotides of each strand, are base-paired. The hairpin loop connects both regions, i.e. antisense region and sense region, of that duplex via e.g. a phosphate or a phosphorothioate linker, i.e. covalently, while the antisense portion typically has a length of about 18 to 20, optionally 19, nucleotides and, therefore, forms the antisense duplex region and the loop. The loop, of which the antisense portion is part, furthermore connects the sense, forming the second strand of the loop, and the antisense portion.

[0142] The term “angiotensinogen” or abbreviated “AGT”, also known as SERPINA 8 or ANHU, is used in its common sense and denotes a protein produced in the liver which is a component of the renin-angiotensin-aldosterone-system (RAAS), and which is converted to angiotensin I by renin when released in circulation. Angiotensinogen is expressed and produced in the liver by the angiotensin gene or “AGT gene”.

[0143] As used herein, the term “muRNA” or “multi RNA” includes nucleic acid constructs comprising more than one, typically two, RNA sequences, i.e. first and second nucleic acid portions, targeting different regions of C3 mRNA; or one region of C3 mRNA and an mRNA region of another target molecule. The targeting RNA sequences are also referred to as “antisense” or “guide” strands, while the respective passenger strands, i.e. third and fourth nucleic acid portions being complementary to the first and second portion, respectively, are also included in the nucleic acid construct. In particular, such muRNA are designed such that subsequent to in vivo administration, they are disassembled and the first and second nucleic acid portions are released. A particular example for such muRNA is shown below, where (1) is the first nucleic acid portion, (2) is the third nucleic acid portion being complementary to (1), (3) is the second nucleic acid portion being complementary to the fourth nucleic acid portion, while (5) is a labile linker while (6) is a ligand, which will both be explained below.

[chemical structure]

[0144] It will also be understood that oligomeric compounds as described herein may have one or more non-hybridizing nucleosides at one or both ends of one or both strands (overhangs) and/or one or more internal non-hybridizing nucleosides (mismatches) provided there is sufficient complementarity to maintain hybridization under physiologically relevant conditions. Alternatively, oligomeric compounds as described herein may be blunt ended at least one end.

[0145] As used herein, the term “complement component C5” or just “C5” denotes the corresponding and commonly known protein, which decomposes into C5a and C5b, wherein C5b forms part of the membrane attack complex at the late stage of the complement activation. C5 is a protein that is in humans encoded by the C5 gene. Complement component C5 is the fifth component of complement, which plays an important role in inflammatory and cell killing processes. This protein is composed of alpha and beta polypeptide chains that are linked by a disulfide bridge. An activation peptide, C5a, which is an anaphylatoxin that possesses potent spasmogenic and chemotactic activity, is derived from the alpha polypeptide via cleavage with a C5-convertase. The C5b macromolecular cleavage product can form a complex with the C6 complement component, and this complex is the basis for formation of the membrane attack complex, which includes additional complement components.

[0146] As used herein, the term “complement component C3” or just “C3” denotes the corresponding and commonly known protein which decomposes into C3a and C3b, wherein C3b forms part of the C3 convertase as well as the C3/C5 convertase. C3 is a protein that is in humans encoded by the C3 gene. Complement component C3 also decomposes spontaneously (“tick over”) in the activation of the alternative pathway of complement activation.

[0147] The term “comprising” is used herein to mean including the method steps or elements identified, but that such steps or elements do not comprise an exclusive list and as such, there may be present additional steps or elements.

[0148] Further, to the extent that the term “includes” is used in either the detailed description or the claims, such term is intended to be inclusive in a manner similar to the term “comprising” as “comprising” is interpreted when employed as a transitional word in a claim.

### The Present Disclosure Relates to the Following Aspects and Embodiments

Small Hairpin (shRNA) and mxRNA Oligomeric Compounds

[0149] According to a first aspect, the present disclosure is directed to an oligomeric compound capable of inhibiting expression of complement factor C3 (C3), wherein the compound comprises at least a first region of linked nucleosides having at least a first nucleobase sequence that is at least partially complementary to at least a portion of RNA transcribed from an C3 gene, wherein the first nucleobase sequence is selected from the following sequences, or a portion thereof: sequences of Table 1a (SEQ ID NOs: 1 to 250), wherein the portion optionally has a length of at least 18 nucleosides. In particular, the 5′ terminal nucleoside of the first nucleobase sequence can contain, i.e. can be replaced by, U instead of A; or U instead of G; or U instead of C, respectively.

[0150] In certain embodiments, the oligomeric compound further may comprise at least a second region of linked nucleosides having at least a second nucleobase sequence that is at least partially complementary to the first nucleobase sequence and is selected from the following sequences, or a portion thereof: sequences of Table 1b (SEQ ID NOs: 251 to 500), wherein the portion optionally has a length of at least 8, 9, 10 or 11, more optionally at least 10, nucleosides.

[0151] In particular, the 3′ terminal nucleoside of the second nucleobase sequence may contain an A instead of U, G or C, respectively; and more particularly the nucleobase A as a complementary nucleobase to the 5′ terminal nucleoside of the first nucleobase sequence.

[0152] The first region of linked nucleosides is also referred to as antisense region or guide region/strand, and the second region of linked nucleosides is referred to as sense region or passenger region/strand. As disclosed in optional embodiments below, the two regions may be located on the same RNA strand, optionally in an adjacent manner. This gives rise to hairpin molecules, also referred to as mxRNAs. On the other hand, the two regions may be located on separate strands, which gives rise to double-stranded RNAs (dsRNAs), wherein optionally each strand consists of the respective region.

[0153] Without wishing to be bound by theory, it is assumed that the disclosed oligomeric compounds set forth above including the first region of linked nucleosides and the second region of linked nucleosides are, during the process of RNA interference, capable of being cleaved by the protein Argonaute 2 (Ago2). The mxRNA is incorporated into the RNA-induced silencing complex (RISC). The RISC assembly then binds and degrades the target mRNA. Specifically, this is accomplished when the guide strand pairs with a complementary sequence in a C3 mRNA molecule and induces cleavage by Ago2, a catalytic component of the RISC. For that reason, as the expression of C3 is inhibited, it is believed effects correlating with overregulation of angiotensin II by the pathway described above, is inhibited too.

[0154] In certain embodiments the first nucleobase sequence is selected from the following sequences, or a portion thereof: SEQ ID NOs: 57, 66, 56, 95, 42, 83, 68, 82, 36, 37, 5, 18, 27, 43, 1, 2, 74, 29, 45, 40, 17, 72, 64, 46, 41, 99, and 14. Optionally, the first nucleobase sequence is selected from the following sequences, or a portion thereof: SEQ ID NOs: 57, 66, 56, 95, 42, 83, 68, 82, 36, 37, 5, 18, 27, and 43, optionally 29, 56, 57, 42, and 95, more optionally 57 and 95, most optionally 95.

[0155] In certain embodiments, the second nucleobase sequence is selected from the following sequences, or a portion thereof: SEQ ID NOs: 307, 316, 306, 345, 292, 333, 318, 332, 286, 287, 255, 268, 277, 293, 251, 252, 324, 279, 295, 290, 267, 322, 314, 296, 291, 349, and 264. Optionally, the second nucleobase sequence is selected from the following sequences, or a portion thereof: SEQ ID NOs: 307, 316, 306, 345, 292, 333, 318, 332, 286, 287, 255, 268, 277 and 293, optionally 279, 307, 306, 292 and 345, more optionally 307 and 345, most optionally 345.

[0156] Therefore, the oligomeric compound according to the present disclosure can comprise SEQ ID NOs 95+345. Alternatively or additionally, the oligomeric compound can comprise SEQ ID NOs 57+307.

### Lengths and Molecular Features of the Oligomeric Compounds According to the First Aspect

[0157] The first region of linked nucleosides may essentially consist of 18 to 35, optionally 18 to 20, more optionally 18 or 19, and yet more optionally 19 linked nucleosides. In addition, the second region of linked nucleosides may consist essentially of 10 to 35, optionally 10 to 20, more optionally 10 to 16, and yet more optionally 10 to 15, in particular 13, 14 or 15 linked nucleosides.

[0158] The oligomeric compound including the first and second regions of linked nucleosides may comprise at least one complementary duplex region that comprises at least a portion of the first region of linked nucleosides directly or indirectly linked to at least a portion of the second region of linked nucleosides, wherein optionally the duplex region has a length of 10 to 19, more optionally 12 to 19, and yet more optionally 12 to 15, in particular 14 or 15, base pairs, wherein optionally there is one mismatch within the duplex region.

[0159] In certain embodiments, each of the first and second regions of linked nucleosides has a 5′ to 3′ directionality thereby defining 5′ and 3′ regions respectively thereof.

[0160] In the oligomeric compound having the first and second regions of linked nucleosides having a 5′ to 3′ directionality, the 5′ region of the first region of linked nucleosides may be directly or indirectly linked to the 3′ region of the second region of linked nucleosides, for example by complementary base pairing, wherein optionally the 5′ terminal nucleoside of the first nucleoside region base pairs with the 3′ terminal nucleoside of the second nucleoside region.

[0161] In the aforementioned embodiments, the 3′ region of the first region of linked nucleosides may be directly or indirectly linked to the 5′ region of the second region of linked nucleosides, wherein optionally the first nucleoside region is directly and covalently linked to the second nucleoside region such as by a phosphate, a phosphorothioate, or a phosphorodithioate, wherein more optionally a 3′ terminal nucleoside of the first region of linked nucleosides is directly and covalently linked to a 5′ terminal nucleoside of the second region of linked nucleosides by a phosphate, a phosphorothioate, or a phosphorodithioate. It is particularly optional that the 3′ terminal nucleoside of the first region is directly linked to the 5′ terminal nucleoside of the second region via a phosphorothioate internucleoside linkage.

[0162] This amounts to the formation of a single oligonucleotide comprising or consisting of the two regions being directly fused to each other. Owing to the base pairing as defined in the previous embodiment, such oligonucleotide will assume a hairpin configuration. Optimized hairpins, especially in terms of size, are the subject of further embodiments below.

[0163] In certain embodiments, the oligomeric compound may consist of the first region of linked nucleosides and the second region of linked nucleosides.

[0164] Each of the regions may constitute a separate strand, thereby giving rise to a double-stranded RNA (dsRNA). Particularly optionally dsRNAs of the disclosure are those with a length of the first strand of 19 nucleosides and a length of the second region of 14 or 15, optionally 14 nucleosides. When used for defining the length of a region or strand, the terms “nucleoside” and “nucleotide” (sometimes abbreviated “nt”) are used equivalently.

[0165] In the alternative, and as stated above, the two regions may be fused together, giving rise to a hairpin.

[0166] In certain embodiments, there may be an intervening third region of linked nucleosides between the first and the second region.

[0167] In optional embodiments, the oligomeric compound comprises or consists of a single strand comprising or consisting of the first, the third, and the second nucleoside regions, wherein at least a portion of the first nucleoside region is directly or indirectly linked to at least a portion of the second nucleoside region so as to form the at least partially complementary duplex region.

[0168] In other words, the oligomeric compound comprises a single strand comprising the first and second nucleoside regions, wherein at least a portion of the first nucleoside region is directly or indirectly linked to at least a portion of the second nucleoside region so as to form the at least partially complementary duplex region. As noted above, the third region is optional.

[0169] In certain embodiments, the oligomeric compound may comprise or may consist of a single strand comprising or consisting of the first and second regions of linked nucleosides, wherein at least a portion of the first region of linked nucleosides is directly or indirectly linked to at least a portion of the second region of linked nucleosides so as to form the at least partially complementary duplex region.

[0170] In the oligomeric compound, which may comprise or may consist of a single strand, the first and the second nucleoside regions are directly adjacent on the single strand.

[0171] In certain embodiments, the first nucleoside region may have a greater number of linked nucleosides compared to the second nucleoside region.

[0172] Optionally, a ratio between a total number of linked nucleosides of the first nucleoside region and a total number of linked nucleosides of the second nucleoside region ranges from about 19/15 to about 19/8 or from about 18/15 to about 18/8. In particularly optional embodiments, the ratio is 19/15, 19/14, 19/13, 18/15, 18/14 or 18/13, most optionally 19/14 or 19/15.

[0173] Alternatively or in addition, a percentage of the total number of linked nucleosides of the first nucleoside region relative to the total number of nucleosides of the oligomeric compound may range from about to about 55% to about 60%. In particularly optional embodiments, the percentage may range from 57% to about 59.5%, most optionally the percentage is about 57.6% or about 59.4%.

[0174] Without wishing to be bound by theory, it is assumed that the ratio and/or percentages as mentioned above provides a suitable ratio/percentage of the number of nucleotides in the antisense (guide) strand and the number of nucleotides in the sense (passenger) strand to be processed by the RISC complex as mentioned above without being significantly degraded before, and therefore, for being effective in C3 knockdown.

[0175] In the oligomeric compound having a greater number of linked nucleotides in the first region than in the second region, the additional number of linked nucleosides of the first nucleoside region form a hairpin loop linking the first and second regions of linked nucleosides, wherein optionally a part of the first nucleobase sequence of the first nucleobase sequence being complementary RNA transcribed from an C3 gene forms the hairpin loop, wherein the loop comprises 2 to 5, optionally 4 or 5, nucleosides.

[0176] Such compounds are also referred to as hairpins or mxRNAs herein. Owing to the second region being shorter as compared to the first region, the compound is optimized in terms of size (or miniaturized) as compared to a conventional siRNA, which has two regions of comparable length.

[0177] Optionally, the loop has 4 or 5 linked nucleosides. Particularly optional is a length of the first region of 19 nucleosides, of the second region of 14 nucleosides, and of the hairpin loop of 5 nucleosides, wherein the 5 nucleosides in the hairpin are the 5 3′-terminal nucleosides of the first region. Such molecular architecture of a hairpin or mxRNA of the disclosure is also designated “14-5-14” herein.

[0178] In certain embodiments, an oligomeric single strand as disclosed earlier herein, can be selected from Table 2, the second nucleobase sequence is selected from the following sequences, or a portion thereof. SEQ ID NOs: 307, 316, 306, 345, 292, 333, 318, 332, 286, 287, 255, 268, 277 and 293, optionally 279, 307, 306, 292 and 345, more optionally 307 and 345, most optionally 345., wherein optionally the 5′ terminal nucleoside of the first region of linked nucleosides includes an U as the nucleobase, and the 5′ terminal nucleoside of the second region of linked nucleosides includes an A as the nucleobase.

[0179] In particular embodiments, the single strand the single strand is selected from Table 3c, in particular from SEQ ID NOs: 1007, 1016, 1006, 1045, 992, 1033, 1018, 1032, 986, 987, 955, 968, 977, 993, 951, 952, 1024, 979, 995, 990, 967, 1022, 1014, 996, 991, 1049, and 964, optionally 979, 1007, 1006, 1045, 992, more optionally 1045 and 1007, most optionally 1045, wherein optionally the 5′ terminal nucleoside of the first region of linked nucleosides includes an U as the nucleobase, and the 5′ terminal nucleoside of the second region of linked nucleosides includes an A as the nucleobase.

[0180] In certain embodiments a hairpin loop as described earlier herein may be present at the 3′ region of the first region of linked nucleosides, wherein optionally one, two or more 3′ terminal nucleosides of the first nucleobase sequence, to the extent the nucleobases of the one, two or more 3′ terminal nucleosides permit, fold back and form or contribute to the second region of linked nucleoside.

[0181] This is a structural design also referred to as “spill-over”. It is only possible in those cases where there is self-complementarity between the nucleobases at the 3′-terminal end of the region of the guide sequence comprised in the duplex and the very 3′-terminal nucleobases of the same guide sequence. For example, this could implemented as a 13-5-13 design, thereby allowing for further miniaturization. The first “13” refers to the region of the guide sequence involved in the duplex, 5 is the length of the loop which is also formed by the guide sequence, and the second 13 refers to the second region of the duplex and is formed by one nucleobase of the guide sequence and 12 nucleobases of the passenger region in 5′ to 3′ direction. As such, a length of the guide sequence of 19 nucleosides is maintained, but the passenger sequence is shortened to 12 nucleosides.

[0182] In certain embodiments, in case a third nucleoside region as described earlier herein, the third nucleoside region and optionally a 3′-terminal portion, optionally consisting of 1, 2, 3, 4, 5, 6, 7, 8, 9, or 10 linked nucleosides, of the first nucleoside region and/or a 5′-terminal portion, optionally consisting of 1, 2, 3, 4, 5, 6, 7, 8, 9, or 10 linked nucleosides, of the second nucleoside region may form a hairpin loop.

[0183] In certain embodiments wherein the hairpin loop comprises 1 to 8, 2 to 7, 3 to 6, optionally 4 or 5 linked nucleosides.

[0184] The oligomeric compounds according to the first aspect disclosed herein may be blunt ended.

[0185] In the oligomeric compounds according to the first aspect disclosed herein, either the first or second nucleoside region may have an overhang.

[0186] In the oligomeric compounds according to the first aspect disclosed herein, in particular from SEQ ID NOs: 1007, 1016, 1006, 1045, 992, 1033, 1018, 1032, 986, 987, 955, 968, 977, 993, 951, 952, 1024, 979, 995, 990, 967, 1022, 1014, 996, 991, 1049, and 964, optionally 979, 1007, 1006, 1045, 992, more optionally 1045 and 1007, most optionally 1045.

[0187] In the oligomeric compounds according to the first aspect disclosed herein the second region may be selected from the sequences of Table 3b, or a portion thereof, especially a portion having a length of 14 nucleosides, in particular from SEQ ID NOs: 907, 916, 906, 945, 892, 933, 918, 932, 886, 887, 855, 868, 877, 893, 851, 852, 924, 879, 895, 890, 867, 922, 914, 896, 891, 949, 864 optionally 879, 907, 906, 945, and 892, more optionally 907 and 945, most optionally 945.

[0188] The oligomeric compound may have a total length of about 25 to about 35 nucleosides, in particular about 33 or about 34 nucleosides.

[0189] In certain embodiments, a terminal nucleoside at a 5′ position of the first region has a nucleobase selected from the group consisting of A, U, G and C, optionally U, and, wherein optionally, a terminal nucleoside at a 3′ position of the second region has a base being complementary to the base at the 5′ position of the first region, optionally A.

### Ligands

[0190] The oligomeric compounds may comprise one or more ligands.

[0191] The one or more ligands, in particular two or more or three ligands, may be conjugated to the second region of linked nucleosides and/or the first region of linked nucleosides.

[0192] The one or more ligands may be conjugated at the 3′ region, optionally at the 3′ terminal nucleoside of the second region of linked nucleosides and/or of the first region of linked nucleosides, and/or to the 5′ terminal nucleoside of the second region of linked nucleosides. In particular, the ligands may be conjugated to the 3′ terminal nucleoside.

[0193] The one or more ligands are any cell directing moiety, such as lipids, carbohydrates, aptamers, vitamins and/or peptides that bind cellular membrane or a specific target on cellular surface.

[0194] The one or more ligands may comprise one or more, in particular three, carbohydrates.

[0195] The one or more, in particular three, carbohydrates can be a monosaccharide, disaccharide, trisaccharide, tetrasaccharide, oligosaccharide or polysaccharide.

[0196] The one or more carbohydrates may comprise or consist of one or more, in particular three, hexose moieties.

[0197] The one or more, in particular three, hexose moieties are one or more galactose moieties, one or more lactose moieties, one or more, in particular three, N-Acetyl-Galactosamine moieties, and/or one or more mannose moieties.

[0198] The one or more carbohydrates may comprise one or more, in particular three, N-Acetyl-Galactosamine moieties.

[0199] Alternatively, the one or more carbohydrates may comprise two or more N-Acetyl-Galactosamine moieties, optionally three.

[0200] The one or more ligands are attached to the oligomeric compound, optionally to the second region of linked nucleosides thereof, in a linear configuration, or in a branched configuration.

[chemical structure]

[0201] Without wishing to be bound by a particular theory, it is assumed that due to such ligand the target tissue, i.e. the liver where C3 is produced, can be selectively targeted so the oligomeric compounds can exhibit their inhibition of C3 gene more efficiently.

[0202] The one or more, in particular three, ligands may be attached to the oligomeric compound as a biantennary or triantennary configuration.

[0203] The one or more ligands as discussed above are optionally attached to the 3′ terminal nucleoside of the second region of linked nucleosides.

### Internucleoside Linkages

[0204] The oligomeric compound according to the first aspect disclosed herein may comprise internucleoside linkages and wherein at least one internucleoside linkage is a modified internucleoside linkage.

[0205] The modified internucleoside linkage may be a phosphorothioate or phosphorodithioate internucleoside linkage.

[0206] The oligomeric compound according to the first aspect disclosed herein may comprise 1 to 16 phosphorothioate or phosphorodithioate internucleoside linkages.

[0207] Optionally modified internucleoside linkages are subject of the optional embodiments, which follow. Certain modified internucleoside linkages are known in the art and described in, for example, Hu et al., Signal Transduction and Targeted Therapy (2020)5:101.

[0208] The oligomeric compound may comprise 7, 8, 9 or 10 phosphorothioate or phosphorodithioate internucleoside linkages. The one or more phosphorothioate or phosphorodithioate internucleoside linkages may present at the 5′ region of the first region of linked nucleosides, wherein optionally, the oligomeric compound comprises three phosphorothioate internucleoside linkages at three adjacent nucleosides at the 5′ region.

[0209] In addition, the oligomeric compound may comprise phosphorothioate or phosphorodithioate internucleoside linkages between at least two, optionally at least three, optionally at least four, optionally at least five, adjacent nucleosides of the hairpin loop, dependent on the number of nucleosides present in the hairpin loop. Particularly, the oligomeric compound may comprise a phosphorothioate or phosphorodithioate internucleoside linkage between each adjacent nucleoside that is present in the hairpin loop.

### Modifications

[0210] In the oligomeric compound according to the first aspect of the present disclosure, at least one nucleoside comprises a modified sugar.

[0211] The modified sugar may be selected from 2′ modified sugars, a conformationally restricted nucleoside (CRN) sugar such as locked nucleic acid (LNA) sugar, (S)-constrained ethyl bicyclic nucleic acid, and constrained ethyl (cEt) sugar, tricyclo-DNA, morpholino, unlocked nucleic acid (UNA) sugar, glycol nucleic acid (GNA), D-hexitol nucleic acid (HNA), and cyclohexene nucleic acid (CeNA).

[0212] Optional modified sugars are subject of the optional embodiments, which follow. Certain modified sugars are known in the art and described in, for example, Hu et al., Signal Transduction and Targeted Therapy (2020)5:101.

[0213] The 2′ modified sugar may be selected from 2′-O-alkyl modified sugar, 2′-O-methyl modified sugar, 2′-O-methoxyethyl modified sugar, 2′-O-allyl modified sugar, 2′-C-allyl modified sugar, 2′-deoxy modified sugar such as 2′-deoxy ribose, 2′-F modified sugar, 2′-arabino-fluoro modified sugar, 2′-O-benzyl modified sugar, and 2′-O-methyl-4-pyridine modified sugar. At least one modified sugar may be a 2′-O-methyl modified sugar.

[0214] At least one modified sugar may be a 2′-F modified sugar and, optionally, at most 16 or 17 sugars are 2′-F modified sugars. Optionally, the sugar is ribose.

[0215] In the oligomeric compound according to the first aspect disclosed herein, sugars of the nucleosides at any of positions 2 and 14 downstream from the first nucleoside of the 5′ region of the first region of linked nucleosides, do not contain 2′-O-methyl modifications.

[0216] In certain embodiments, the 3′ terminal position of the second region of linked nucleosides does not contain a 2′-O-methyl modification.

[0217] In certain embodiments, sugars of the nucleosides at any of positions 2 and 14 downstream from the first nucleoside of the 5′ region of the first region of linked nucleosides contain 2′-F modifications.

[0218] In certain embodiments, sugars of the nucleosides of the second region of linked nucleosides that correspond in position to any of the nucleosides of the first region of linked nucleosides at any of positions 11 to 13 downstream from the first nucleoside of the 5′ region of the first region of linked nucleosides contain 2′-F modifications.

[0219] In certain embodiments, the 3′ terminal nucleoside of the second region of linked nucleosides contains a 2′-F modification.

[0220] In certain embodiments, one or more of the odd numbered nucleosides starting from the 5′ region of the first region of linked nucleosides may be modified, and/or wherein one or more of the even numbered nucleosides starting from the 5′ region of the first region of linked nucleosides may be modified, wherein typically the modification of the even numbered nucleosides is a second modification that is different from the modification of odd numbered nucleosides.

[0221] In certain embodiments, one or more of the odd numbered nucleosides starting from the 3′ region of the second region of linked nucleosides may be modified by a modification that is different from the modification of odd numbered nucleosides of the first region of linked nucleosides.

[0222] In certain embodiments, one or more of the even numbered nucleosides starting from the 3′ region of the second region of linked nucleosides are modified by a modification that is different from the modification of even numbered nucleosides of the first region of linked nucleoside.

[0223] In certain embodiments, at least one or more of the modified even numbered nucleosides of the first region of linked nucleosides is adjacent to at least one or more of the differently modified odd numbered nucleosides of the first nucleoside region.

[0224] In certain embodiments, at least one or more of the modified even numbered nucleosides of the second nucleoside region is adjacent to at least one or more of the differently modified odd numbered nucleosides of the second region of linked nucleosides.

[0225] In certain embodiments, sugars of one or more of the odd numbered nucleosides starting from the 5′ region of the first region of nucleosides may be 2′-O-methyl modified sugars.

[0226] In certain embodiments, one or more of the even numbered nucleosides starting from the 3′ region of the first region of linked nucleosides may be 2′-F modified sugars.

[0227] In certain embodiments, sugars of one or more of the odd numbered nucleosides starting from the 5′ region of the second region of linked nucleosides may be 2′-0 methyl modified sugars.

[0228] In certain embodiments, one or more of the even numbered nucleosides starting from the 5′ region of the second region of linked nucleosides may be 2′-F modified sugars.

[0229] In certain embodiments, sugars of a plurality of adjacent nucleosides of the first nucleoside region may be modified by a common or different modification.

[0230] In certain embodiments, sugars of a plurality of adjacent nucleosides of the second nucleoside region may be modified by a common or different modification.

[0231] In certain embodiments, sugars of a plurality of adjacent nucleosides of the hairpin loop may be modified by a common or different modification. The common modification may be a 2′-F modified sugar.

[0232] Alternatively, the common modification may be a 2′-O-methyl modified sugar.

[0233] The plurality of adjacent 2′-O-methyl modified sugars may be present in at least eight adjacent nucleosides of the first and/or second nucleoside regions. The plurality of adjacent 2′-O-methyl modified sugars may be present in three or four adjacent nucleosides of the hairpin loop.

[0234] In certain embodiments, wherein the hairpin loop, as disclosed earlier herein, may comprise at least one nucleoside having a modified sugar.

[0235] In certain embodiments, the at least one nucleoside is adjacent to a nucleoside with a differently modified sugar, wherein optionally all adjacent nucleosides in the hairpin loop have a differently modified sugar.

[0236] In certain embodiments, the modified sugar is a 2′-O-methyl modified sugar, and the differently modified sugar is a 2′-F modified sugar.

[0237] In certain embodiments one or more nucleosides of the first region of linked nucleosides and/or the second region of linked nucleosides may be an inverted nucleoside and is attached to an adjacent nucleoside via the 3′ carbon of its sugar and the 3′ carbon of the sugar of the adjacent nucleoside, and/or one or more nucleosides of the first region of linked nucleosides and/or the second region of linked nucleosides is an inverted nucleoside and is attached to an adjacent nucleoside via the 5′ carbon of its sugar and the 5′ carbon of the sugar of the adjacent nucleoside.

muRNA Nucleic Acid Constructs

[0238] According to a second aspect, the present disclosure is directed to a nucleic acid construct comprising at least:
[0239] (a) a first nucleic acid portion that is at least partially complementary to at least a first portion of an RNA, which is transcribed from an C3 gene;
[0240] (b) a second nucleic acid portion that is at least partially complementary to at least a second portion of an RNA, which is transcribed from a C3 gene, the second portion being different from the first portion;
[0241] (c) a third nucleic acid portion that is at least partially complementary to the first nucleic acid portion of (a), so as to form a first nucleic acid duplex region therewith;
[0242] (d) a fourth nucleic acid portion that is at least partially complementary to the second nucleic acid portion of (b), so as to form a second nucleic acid duplex region therewith.

[0243] The construct may be designed such that subsequent to in vivo administration the construct disassembles to yield at least first and second discrete nucleic acid targeting molecules that respectively target the RNA portions transcribed from the target genes of (a) and (b);

[0244] whereby (i) the first nucleic acid targeting molecule is capable of modulating expression of the target gene of (a), and comprises, or is derived from, at least the first nucleic acid portion of (a), and (ii) the second nucleic acid targeting molecule is capable of modulating expression of the target gene of (b), and comprises, or is derived from, the second nucleic acid portion of (b).

[0245] The construct may be designed to disassemble such that the first and second discrete nucleic acid targeting molecules are respectively processed by independent RNAi-induced silencing complexes.

### Sequence Features, Labile Functionality and Structural Features of the RNA Molecules

[0246] The construct according to the second aspect and its aforementioned embodiments may at least comprise one labile functionality such that subsequent to in vivo administration the construct is cleaved so as to yield the at least first and second discrete nucleic acid targeting molecules.

[0247] The labile functionality may comprise one or more unmodified nucleotides. In particular the one or more unmodified nucleotides of the labile functionality represent one or more cleavage positions within the construct whereby subsequent to in vivo administration the construct is cleaved at the one or more cleavage positions so as to yield the at least first and second discrete nucleic acid targeting molecules. Especially the cleavage positions may be respectively located within the construct so that subsequent to cleavage the first discrete nucleic acid targeting molecule comprises, or is derived from, the first nucleic acid duplex region, and the second discrete nucleic acid targeting molecule comprises, or is derived from, the second nucleic acid duplex region. Optionally, the first discrete nucleic acid targeting molecule comprises or consists of the first nucleic acid portion of (a) and the third nucleic acid portion of (c), and/or the second discrete nucleic acid targeting molecule comprises or consists of the second nucleic acid portion of (b) and the fourth nucleic acid portion of (d).

[0248] In certain embodiments
[0249] (a) the first nucleic acid portion has a nucleobase sequence selected from SEQ ID NOs: 1 to 250 in Table 1a;
[0250] (b) the second nucleic acid portion has a nucleobase sequence selected from Table 1a (SEQ ID NOs: 1 to 250);
[0251] (c) the third nucleic acid portion has a nucleobase sequence selected from Table 1b SEQ ID NOs: 251 to 500; and/or
[0252] (d) the fourth nucleic acid portion has a nucleobase sequence selected from Table 1b (SEQ ID NOs: 251 to 500).

[0253] Wherein the third and fourth nucleobase sequences, to the extent they have a length of 14 nucleobases, may be shorter by one, two or three nucleobases, wherein optionally the 5-terminal nucleobase(s) is/are absent.

[0254] In certain such embodiments, the first nucleic acid portion of (a) may be directly or indirectly linked to the fourth nucleic acid portion of (d) as a primary structure.

[0255] In certain embodiments, the first and the fourth nucleic acid portions have the nucleobase sequences of SEQ ID NOs: 95 and 307, or 57 and 345 respectively, optionally, wherein the sequences of SEQ ID NOs: 307 and/or 345 may be shorter by one, two, three or four nucleobases, wherein optionally the 5-terminal nucleobase(s) is/are absent.

[0256] In certain embodiments, the second nucleic acid portion of (b) may be directly or indirectly linked to the third nucleic acid portion of (c) as a primary structure.

[0257] In certain embodiments, the first and the fourth nucleic acid portions have the nucleobase sequences of SEQ ID NOs: 95 and 307, or 57 and 345 respectively, optionally, wherein the sequences of SEQ ID NOs: 307 and/or 345 may be shorter by one, two, three or four nucleobases, wherein optionally the 5-terminal nucleobase(s) is/are absent.

[0258] In certain embodiments, the construct may further comprise 1 to 8 additional nucleic acid portions that are respectively at least partially complementary to an additional 1 to 8 portions of RNA transcribed from one or more target genes, which target genes may be the same or different to each other, and/or the same or different to the target genes defined in (a) and/or (b), and wherein each of the 1 to 8 additional nucleic acid portions respectively form additional duplex regions with respective passenger nucleic acid portions that are respectively at least partially complementary therewith. In particular, the second nucleic acid portion of (b), and the 1 to 8 additional nucleic acid portions, may be directly or indirectly linked to selected passenger nucleic acid portions as respective primary structures.

[0259] In certain embodiments the direct or indirect linking may represent either (i) an internucleotide bond, (ii) an internucleotide nick, or (iii) a nucleic acid linker portion of 1, 2, 3, 4, 5, 6, 7, 8, 9, or 10 nucleotides, the nucleic acid linker optionally being single stranded. Optionally, the linking may be direct, thereby giving rise to (a) contiguous strand(s).

[0260] In certain embodiments, there may exist some complementarity between the first nucleic acid portion of (a) and the second nucleic acid portion of (b), or the third nucleic acid portion of (c) and the fourth nucleic acid portion of (d). Optionally the complementarity
[0261] (i) may be 1, 2, 3, 4, 5, 6, 7, 8, 9, or 10, optionally 2, 3, 4 or 5 base pairs; and/or
[0262] (ii) may be between the first nucleic acid portion of (a) and the second nucleic acid portion of (b).

[0263] In certain embodiments, the internucleotide bond may involve at least one of the one or more unmodified nucleotides, wherein optionally cleavage may occur at the 3′ position of (at least one of) the unmodified nucleotide(s).

[0264] In certain embodiments, the first nucleic acid portion of (a), and/or the second nucleic acid portion of (b), and/or the third nucleic acid portion of (c), and/or the fourth nucleic acid portion of (d), may be respectively 7 to 25 nucleotides in length. Optionally, the first nucleic acid portion of (a) and/or the second nucleic acid portion of (b) may have a length of 18 to 21, more optionally 18 to 20, and yet more optionally 19 nucleotides. In optional embodiments, the first nucleic acid portion of (a) and the second nucleic acid portion of (b) have a length of 19 nucleotides. It may be further optional that the third nucleic acid portion of (c), and/or the fourth nucleic acid portion of (d) have a length of 11 to 20, more optionally 13 to 16, and yet more optionally 14 or 15, most optionally 14 nucleotides.

[0265] In certain embodiments, the first nucleic portion of (a) and the second nucleic acid portion of (b) may have a length of 19 nucleotides and the third nucleic acid portion of (c) as well as the fourth nucleic acid portion of (b) may have a length of 14 nucleotides.

[0266] In certain embodiments, the unmodified nucleotide(s) is/are at any of position 18 to 25, more optionally at any of positions 18 to 21, and/or the 3′ terminal position of the first nucleic acid portion of (a) and/or of the third nucleic acid portion of (c).

[0267] In certain embodiments, wherein the unmodified nucleotide is at position 19.

[0268] In certain embodiments, the first nucleic portion of (a) and the second nucleic acid portion of (b) may have a length of 19 nucleotides and the third nucleic acid portion of (c) as well as the fourth nucleic acid portion of (b) may have a length of 14 nucleotides and the unmodified nucleoside is at position 19 of the first nucleic acid portion of (a) and the second nucleic acid portion of (b).

[0269] In certain embodiments, the nucleic acid linker portion may be 1 to 8 nucleotides in length, optionally 2 to 7 or 3 to 6 nucleotides in length, more optionally about 4 or 5 and most optionally 4 nucleotides in length.

[0270] In certain embodiments, one, more of all of the duplex regions independently may have a length of 10 to 19, more optionally 13 to 19, and yet more optionally 13, 14 or 15 base pairs, most optionally 14 base pairs, wherein optionally there is one mismatch within the duplex region.

[0271] In certain embodiments, the nucleic acid construct may be blunt ended.

[0272] In certain embodiments,
[0273] the first nucleic acid portion of (a); and/or
[0274] the second nucleic acid portion of (b); and/or
[0275] the third nucleic acid portion of (c); and/or
[0276] the fourth nucleic acid portion of (d); and/or
[0277] to the extent present, the 1 to 8 additional nucleic acid portions as defined previously herein; and/or
[0278] to the extent present, the passenger nucleic acid portions as defined previously herein;
[0279] may have an overhang.

[0280] In certain embodiments, the target RNA may be an mRNA or another RNA molecule.

### Ligands

[0281] The nucleic acid construct according to the second aspect and the aforementioned embodiments may further comprise one or more ligands.

[0282] In certain embodiments, the first nucleic acid portion of (a), and/or the second nucleic acid portion of (b), and/or the third nucleic acid portion of (c), and/or the fourth nucleic acid portion of (d), and/or, to the extent present, the 1 to 8 additional nucleic acid portions as defined previously herein, and/or the passenger nucleic acid portions as defined previously herein, respectively may have a 5′ to 3′ directionality thereby defining 5′ and 3′ regions thereof.

[0283] In certain embodiments, one or more ligands are conjugated at the 3′ region, optionally the 3′ end, of any of (i) the third nucleic acid portion of (c), and/or (ii) the fourth nucleic acid portion of (d), and/or, to the extent present, the (iii) passenger nucleic acid portions as defined previously herein.

[0284] In certain embodiments, one or more ligands may be conjugated at one or more regions intermediate of the 5′ and 3′ regions of any of the nucleic acid portions, optionally of the third nucleic acid portion of (c), and/or the fourth nucleic acid portion of (d), and/or the passenger nucleic acid portions as defined previously herein.

[0285] In certain embodiments, one or more ligands may be conjugated at the 5′ region, optionally the 5′ end, of any of the nucleic acid portions.

[0286] In certain embodiments, the one or more ligands may be any cell directing moiety, such as lipids, carbohydrates, aptamers, vitamins and/or peptides that bind cellular membrane or a specific target on cellular surface. In an optional embodiment, the one or more carbohydrates can be a monosaccharide, disaccharide, trisaccharide, tetrasaccharide, oligosaccharide or polysaccharide. In a more optional embodiment, the one or more carbohydrates may comprise one or more hexose moieties. Especially, the one or more hexose moieties may be one or more galactose moieties, one or more lactose moieties, one or more N-Acetyl-Galactosamine moieties, and/or one or more mannose moieties. The hexose moiety may be comprise two or three N-Acetyl-Galactosamine moieties. In particular, the hexose moiety may comprise three N-Acetyl-Galactosamine moieties.

[0287] In certain embodiments, the one or more ligands may be attached in a linear configuration, or in a branched configuration. Optionally, wherein the one or more ligands may be attached as a biantennary or triantennary configuration, or as a configuration based on single ligands at different positions.

[0288] Optionally, the ligand may have the following structure:

[chemical structure]

### Internucleoside Linkages

[0289] The nucleotide construct according to the second aspect of the present disclosure or its aforementioned embodiments may comprise one or more phosphorothioate or phosphorodithioate internucleotide linkages.

[0290] In certain embodiments, the nucleic acid construct may comprise 1 to 15 phosphorothioate or phosphorodithioate internucleotide linkages.

[0291] In certain embodiments, the nucleic acid construct may comprise one or more phosphorothioate or phosphorodithioate internucleotide linkages at one or more of the 5′ and/or 3′ regions of the first nucleic acid portion of (a), and/or the second nucleic acid portion of (b), and/or the third nucleic acid portion of (c), and/or the fourth nucleic acid portion of (d), and/or the 1 to 8 additional nucleic acid portions as defined previously herein, and/or the passenger nucleic acid portions as defined in previously herein.

[0292] In certain embodiments, the nucleic acid construct may comprise phosphorothioate or phosphorodithioate internucleotide linkages between at least two adjacent nucleotides of the nucleic acid linker portion as defined in previously herein.

[0293] In certain embodiments, the nucleic acid construct may comprise a phosphorothioate or phosphorodithioate internucleotide linkage between each adjacent nucleotide that is present in the nucleic acid linker portion.

[0294] In certain embodiments, the nucleic acid construct may comprises a phosphorothioate or phosphorodithioate internucleotide linkage linking:
[0295] the first nucleic acid portion of (a) to the nucleic acid linker portion as defined in previously herein; and/or
[0296] the second nucleic acid portion of (b) to the nucleic acid linker portion as defined previously herein; and/or
[0297] the third nucleic acid portion of (c) to the nucleic acid linker portion as defined previously herein; and/or
[0298] the fourth nucleic acid portion of (d) to the nucleic acid linker portion as defined previously herein; and/or
[0299] the 1 to 8 additional nucleic acid portions as defined previously herein to the nucleic acid linker portion as further defined previously herein; and/or
[0300] the passenger nucleic acid portions as defined previously herein to the nucleic acid linker portion as further defined previously herein.

### Modifications

[0301] In the nucleic acid construct according to the second aspect of the present disclosure and its aforementioned embodiments, at least one nucleotide of at least one of the following may be modified:
[0302] the first nucleic acid portion of (a); and/or
[0303] the second nucleic acid portion of (b); and/or
[0304] the third nucleic acid portion of (c); and/or
[0305] the fourth nucleic acid portion of (d); and/or
[0306] to the extent present, the 1 to 8 additional nucleic acid portions as defined previously herein; and/or
[0307] to the extent present, the passenger nucleic acid portions as defined previously herein; and/or
[0308] to the extent present, the nucleic acid linker portion as further defined previously herein.

[0309] In an optional embodiment, one or more of the odd numbered nucleotides starting from the 5′ region of one of the following may be modified, and/or wherein one or more of the even numbered nucleotides starting from the 5′ region of one of the following are modified, wherein typically the modification of the even numbered nucleotides is a second modification that is different from the modification of odd numbered nucleotides:
[0310] the first nucleic acid portion of (a); and/or
[0311] the second nucleic acid portion of (b); and/or
[0312] the third nucleic acid portion of (c); and/or
[0313] the fourth nucleic acid portion of (d); and/or
[0314] to the extent present, the 1 to 8 additional nucleic acid portions as defined previously herein; and/or
[0315] to the extent present, the passenger nucleic acid portions as defined previously herein.

[0316] In certain embodiments, one or more of the odd numbered nucleotides starting from the 3′ region of the third nucleic acid portion of (c) may be modified by a modification that is different from the modification of odd numbered nucleotides starting from the 5′ region of the first nucleic acid portion of (a); and/or
[0317] one or more of the odd numbered nucleotides starting from the 3′ region of the fourth nucleic acid portion of (d) may be modified by a modification that is different from the modification of odd numbered nucleotides starting from the 5′ region of the second nucleic acid portion of (b); and/or
[0318] one or more of the odd numbered nucleotides starting from the 3′ region of the passenger nucleic acid portions as defined previously herein, to the extent present, may be modified by a modification that is different from the modification of odd numbered nucleotides starting from the 5′ region of the 1 to 8 additional nucleic acid portions as defined previously herein; and/or
[0319] wherein one or more of the nucleotides of a nucleic acid linker portion as further defined previously herein, to the extent present, may be modified by a modification that (i) is different from the modification of an adjacent nucleotide of the 3′ region of the first nucleic acid portion of (a); and/or (ii) is different from the modification of an adjacent nucleotide of the 3′ region of the second nucleic acid portion of (b); and/or is different from the modification of an adjacent nucleotide of the 3′ region of the 1 to 8 additional nucleic acid portions, to the extent present, as defined previously herein.

[0320] In certain embodiments, one or more of the even numbered nucleotides starting from the 3′ region of: (i) the third nucleic acid portion of (c), and/or (ii) the fourth nucleic acid portion of (d), and/or (iii) the passenger nucleic acid portions as defined previously herein, to the extent present, may be modified by a modification that is different from the modification of odd numbered nucleotides starting from the 3′ region of these respective portions.

[0321] In certain embodiments, at least one or more of the modified even numbered nucleotides of (i) the first nucleic acid portion of (a), and/or (ii) the second nucleic acid portion of (b), and/or (iii), to the extent present, the 1 to 8 additional nucleic acid portions as defined previously herein, may be adjacent to at least one or more differently modified odd numbered nucleotides of these respective portions.

[0322] In certain embodiments, at least one or more of the modified even numbered nucleotides of (i) the third nucleic acid portion of (c), and/or (ii) the fourth nucleic acid portion of (d), and/or (iii), to the extent present, the passenger nucleic acid portions as defined previously herein, may be adjacent to at least one or more differently modified odd numbered nucleotides of these respective portions.

[0323] In certain embodiments, a plurality of adjacent nucleotides of (i) the first nucleic acid portion of (a), and/or (ii) the second nucleic acid portion of (b), and/or (iii), to the extent present, the 1 to 8 additional nucleic acid portions as defined previously herein, may be modified by a common modification.

[0324] In certain embodiments, a plurality of adjacent nucleotides of (i) the third nucleic acid portion of (c), and/or (ii) the fourth nucleic acid portion of (d), and/or (iii), to the extent present, the passenger nucleic acid portions as defined previously herein, may be modified by a common modification.

[0325] In certain embodiments, the plurality of adjacent commonly modified nucleotides may be 2 to 4 adjacent nucleotides, optionally 3 or 4 adjacent nucleotides.

[0326] In certain embodiments, the plurality of adjacent commonly modified nucleotides may be located in the 5′ region of (i) the third nucleic acid portion of (c), and/or (ii) the fourth nucleic acid portion of (d), and/or (iii), to the extent present, the passenger nucleic acid portions previously herein.

[0327] In certain embodiments, a plurality of adjacent commonly modified nucleotides may be located in the nucleic acid linker portion as further defined previously herein.

[0328] In certain embodiments, the one or more of the modified nucleotides of first nucleic acid portion of (a) may not have a common modification present in the corresponding nucleotide of the third nucleic acid portion of (c) of the first duplex region; and/or one or more of the modified nucleotides of second nucleic acid portion of (b) may not have a common modification present in the corresponding nucleotide of the fourth nucleic acid portion of (d) of the second duplex region; and/or one or more of the modified nucleotides of the 1 to 8 additional nucleic acid portions, to the extent present, as defined previously herein, may not have a common modification present in the corresponding nucleotide of the corresponding passenger nucleic acid portions of the respective duplex regions.

[0329] In certain embodiments, the one or more of the modified nucleotides of the first nucleic acid portion of (a) may be shifted by at least one nucleotide relative to a commonly modified nucleotide of the third nucleic acid portion of (c); and/or one or more of the modified nucleotides of the second nucleic acid portion of (b) may be shifted by at least one nucleotide relative to a commonly modified nucleotide of the fourth nucleic acid portion of (d); and/or one or more of the modified nucleotides of the 1 to 8 additional nucleic acid portions, to the extent present, as defined previously herein may be shifted by at least one nucleotide relative to a commonly modified nucleotide of the passenger nucleic acid portions, to the extent present, as defined previously herein.

[0330] In certain embodiments, the modification and/or modifications may be each and individually sugar, phosphate, or base modifications.

[0331] In certain embodiments, the modification may be selected from nucleotides with 2′ modified sugars; conformationally restricted nucleotides (CRN) sugar such as locked nucleic acid (LNA), (S)-constrained ethyl bicyclic nucleic acid, and constrained ethyl (cEt), tricyclo-DNA; morpholino, unlocked nucleic acid (UNA), glycol nucleic acid (GNA), D-hexitol nucleic acid (HNA), and cyclohexene nucleic acid (CeNA). In optional embodiments, wherein the 2′ modified sugar may be selected from 2′-O-alkyl modified sugar, 2′-O-methyl modified sugar, 2′-O-methoxyethyl modified sugar, 2′-O-allyl modified sugar, 2′-C-allyl modified sugar, 2′-deoxy modified sugar such as 2′-deoxy ribose, 2′-F modified sugar, 2′-arabino-fluoro modified sugar, 2′-O-benzyl modified sugar, 2′-amino modified sugar, and 2′-O-methyl-4-pyridine modified sugar.

[0332] In certain embodiments, the base modification may be any one of an abasic nucleotide and a non-natural base comprising nucleotide.

[0333] In certain embodiments, at least one modification may be a 2′-O-methyl modification in a ribose moiety.

[0334] In certain embodiments, at least one modification may be a 2′-F modification in a ribose moiety.

[0335] In certain embodiments, the nucleotides at any of positions 2 and 14 downstream from the first nucleotide of the 5′ region of (i) the first nucleic acid portion of (a); and/or (ii) the second nucleic acid portion of (b); and/or (iii), to the extent present, the 1 to 8 additional nucleic acid portions as defined previously herein; may not contain 2′-O-methyl modifications in ribose moieties.

[0336] In certain embodiments, one, two or all three nucleotides of (i) the third nucleic acid portion of (c); and/or (ii) the fourth nucleic acid portion of (d); and/or (iii), to the extent present, the passenger nucleic acid portions as defined previously herein; that respectively correspond in position to any of the nucleotides at any of positions 11 to 13 downstream from the first nucleotide of the 5′ region of (i) the first nucleic acid portion of (a); and/or (ii) the second nucleic acid portion of (b); and/or (iii) the 1 to 8 additional nucleic acid portions, to the extent present, as defined previously herein; may not contain 2′-O-methyl modifications in ribose moieties.

[0337] In certain embodiments, the nucleotides at any of positions 2 and 14 downstream from the first of (i) the first nucleic acid portion of (a); and/or (ii) the second nucleic acid portion of (b); and /or (iii), to the extent present, the 1 to 8 additional nucleic acid portions as defined previously herein; may contain 2′-F modifications in ribose moieties.

[0338] In certain embodiments, one, two or all three nucleotides of (i) the third nucleic acid portion of (c); and or (ii) the fourth nucleic acid portion of (d); and/or (iii), to the extent present, the passenger nucleic acid portions as defined previously herein; that respectively correspond in position to any of the nucleotides at any of positions 11 to 13 downstream from the first nucleotide of the 5′ region of (i) the first nucleic acid portion of (a); and/or (ii) the second nucleic acid portion of (b); and/or (iii), to the extent present, the 1 to 8 additional nucleic acid portions as defined previously herein; may contain 2′-F modifications in ribose moieties.

[0339] In certain embodiments, all remaining nucleotides may contain either 2′-O-methyl modifications or 2′-F modifications in ribose moieties, optionally with the exception of the unmodified nucleotide(s) in accordance with the labile linkage defined herein. Optionally, the remaining nucleotides may contain 2′-O-methyl modifications in ribose moieties.

[0340] In certain embodiments, the one or more, optionally one, unmodified nucleotide represents any of the nucleotides of the nucleic acid linker portion as further defined previously herein, optionally the nucleotide of the nucleic acid linker portion as further defined previously herein that is adjacent to (i) the third nucleic acid portion of (c); and or (ii) the fourth nucleic acid portion of (d); and/or (iii), to the extent present, the passenger nucleic acid portions as defined previously herein.

[0341] In certain embodiments,
[0342] (a) the first nucleic acid portion may be selected from Table 3a;
[0343] (b) the second nucleic acid portion may be selected from Table 3a;
[0344] (c) the third nucleic acid portion may be selected from Table 3b; and/or
[0345] (d) the fourth nucleic acid portion may be selected from Table 3b.

[0346] In optional embodiments, the first nucleic acid portion and the second nucleic acid portion may be selected from Table 3a, wherein the first and second nucleic acid portions are different; and the third and fourth nucleic acid portions may be selected from Table 3b.

[0347] The antisense constructs and sense constructs shown in the section “Small hairpin (shRNA) and mxRNA” are optional here correspondingly and, for the avoidance of repetition, their embodiments are equally combinable for the muRNA constructs.

[0348] In certain embodiments, the 3′ terminal positions of the first and the third nucleic acid portions may be replaced with an unmodified nucleotide.

[0349] In certain embodiments, the nucleic acid construct may comprise at least one vinylphosphonate modification, such as at least one vinylphosphonate modification in the 5′ region of (i) the first nucleic acid portion of (a); and/or (ii) the second nucleic acid portion of (b); and/or (iii), to the extent present, the 1 to 8 additional nucleic acid portions as defined previously herein.

[0350] In certain embodiments, one or more nucleotides of
[0351] the first nucleic acid portion of (a); and/or
[0352] the second nucleic acid portion of (b); and/or
[0353] the third nucleic acid portion of (c); and/or
[0354] the fourth nucleic acid portion of (d); and/or
[0355] to the extent present, the 1 to 8 additional nucleic acid portions as defined previously herein; and/or
[0356] to the extent present, the passenger nucleic acid portions as defined previously herein;

[0357] may be an inverted an inverted nucleotide and may be attached to the adjacent nucleotide via the 3′ carbon of the nucleotide and the 3′ carbon of the adjacent nucleotide, and/or may be an inverted nucleotide and may be attached to the adjacent nucleotide via the 5′ carbon of the nucleotide and the 5′ carbon of the adjacent nucleotide.

[0358] In certain embodiments, the inverted nucleotide may be attached to the adjacent nucleotide via a phosphate group by way of a phosphodiester linkage; or may be attached to the adjacent nucleotide via a phosphorothioate group; or may be attached to the adjacent nucleotide via a phosphorodithioate group.

Compositions and Pharmaceutical Compositions Including shRNA, mxRNA and/or muRNA Oligomeric Constructs

[0359] According to a third aspect, the present disclosure is directed to a composition comprising an oligomeric compound according to the first aspect and/or a nucleic acid construct according the second aspect of the present disclosure, and a physiologically acceptable excipient.

[0360] According to a fourth aspect, the present disclosure is directed to pharmaceutical composition comprising an oligomeric compound according to the first aspect and/or a nucleic acid construct according to the second aspect of the present disclosure.

[0361] The pharmaceutical composition may further comprise a pharmaceutically acceptable excipient, diluent, antioxidant, and/or preservative.

[0362] The oligomeric compound according to the first aspect and/or the construct according to the second aspect may be the only pharmaceutically active agent(s).

[0363] Alternatively, the pharmaceutical composition furthermore comprises one or more further pharmaceutically active agents. The further pharmaceutically active agent(s) is/are (an) agent(s) which modulate(s) the innate and/or the adaptive immune system, for example a further oligomeric compound which is directed to an immune system target different from complement component C5, optionally Interleukin-6; agents lowering the expression or level of Interleukin-6; or an agent such as complement inhibitor, the antibody optionally being Pegcetacoplan. Optionally, the oligomeric compound and/or the nucleic acid construct; and the further pharmaceutically active agent(s) are to be administered concomitantly or in any order.

Diseases to be Treated by shRNA, mxRNA and/or muRNA Oligomeric Compounds and Further Uses

[0364] According to a fifth aspect, the present disclosure is directed to an oligomeric compound according to the first aspect and/or a nucleic acid construct according to the second aspect of the present disclosure, for use in human or veterinary medicine or therapy.

[0365] According to a sixth aspect, the present disclosure is directed to an oligomeric compound according to the first aspect and/or a nucleic acid construct according to the second aspect of the present disclosure, for use in a method of treating, ameliorating and/or preventing a disease or disorder.

[0366] The disease or disorder may be a disease or disorder associated C3 or a disease or disorder requiring reduction of C3 expression.

[0367] In particular, the disease or disorder is selected from autoimmune disease, complement system dysfunction including aberrant upregulation of complement components such as C3, C3 glomerulopathy, Chronic obstructive pulmonary disease (COPD), paroxysmal nocturnal hemoglobinuria (PNH); age-related macular degeneration (AMD) and/or granuloma annulare (GA), warm autoimmune hemolytic anemia (wAIHA), and coronary artery disease (CAD); Alzheimer's disease (AD), Amyotrophic Lateral Sclerosis (ALS), schizophrenia, Parkinson's disease (PD), and prion diseases, such as Creutzfeldt-Jakob disease (CJD). For example, neuroinflammation in AD, ALS, schizophrenia, PD, and prion disease is associated with increased microglial and astrocyte activation and C3, lupis nephritis (LN), bullous pemphigoid, pemphigus, pemphigus vulgaris (PV) and pemphigus foliaceus (PF) atypical hemolytic uremic syndrome (aHUS), atypical hemolytic uremic syndrome (aHUS), neuromyelitis optica (NMO), multifocal motor neuropathy (MMN), myasthenia gravis (MG), C3 glomerulonephritis, and systemic lupus erythmatosis.

[0368] In particular, the disease of disorder is selected from C3 glomerulopathy, Chronic obstructive pulmonary disease (COPD), paroxysmal nocturnal hemoglobinuria (PNH); age-related macular degeneration (AMD) and/or granuloma annulare (GA), warm autoimmune hemolytic anemia (wAIHA), and coronary artery disease (CAD).

[0369] The oligomeric compound and/or the nucleic acid construct may be administered subcutaneously or intravenously to the individual. Optionally, the administration of any oligomeric compound or nucleic acid construct disclosed herein may be subcutaneously.

[0370] According to an eighth aspect, the present disclosure is directed to a use of an oligomeric compound according to the first aspect or a nucleic acid construct according to the second aspect, for use in research as a gene function analysis tool.

[0371] According to a ninth aspect, the present disclosure is directed to a use of an oligomeric compound according to the first aspect and/or a nucleic acid construct according to the second aspect in the manufacture of a medicament for a treatment of a disease or disorder.

[0372] In certain embodiments, the nucleic acid construct and/or the oligomeric compound is administered at a dose of about 0.05 mg/kg to about 50.0 mg/kg, optionally 0.05 mg/kg to about 30.0 mg/kg or 10.0 mg/kg to about 50.0 mg/kg, of body weight of the human subject. In other words, the mass indicated in “mg” is the mass of administered nucleic acid construct and/or oligomeric compound and the mass indicated in “kg” is the kilogram bodyweight of the human subjects to which the “mg” mass refers.

### Constructs and Sequences of the Disclosed Oligomeric Compounds

[0373] The following Tables show nucleobase sequences of antisense and sense strands of oligomeric compounds of the disclosure as well as of nucleobase sequences of single-stranded oligomeric compounds of the disclosure, and definitions of modified oligomeric compounds of the disclosure (the notation including nucleobase sequence, sugar modifications, and, where applicable, modified phosphates).

[0374] The notation used is common in the art and as the following meaning:
[0375] A represents adenine;
[0376] U represents uracil;
[0377] C represents cytosine;
[0378] G represents guanine.
[0379] 5Phos represents a 5′ terminal phosphate group which is optional but not indispensable;
[0380] m represents a methyl modification at the 2′ position of the sugar of the underlying nucleoside;
[0381] f represents a fluoro modification at the 2′ position of the sugar of the underlying nucleoside;
[0382] r indicates an unmodified (2′-OH) ribonucleotide;
[0383] [Ps] or #represents a phosphorothioate inter-nucleoside linkage;
[0384] i represents an inverted inter-nucleoside linkage, which can be either 3′-3′, or 5′-5′;
[0385] 3×GalNAc represents a trivalent GalNAc.

[0386] Tables 1a and 1b below show nucleobase sequences of antisense and sense strands of 250 oligomeric compounds in accordance with the Examples.

TABLE 1a
Nucleobase sequences of the antisense strands of
250 constructs of the disclosure

| SEQ ID NO: | Antisense ID | 19 mer Antisense |
|---|---|---|
| 1 | 23901 | UAGGCUCGGAUCUUCCACU |
| 2 | 23902 | AGAGAGAAGACCUUGACCA |
| 3 | 23903 | CCACACAGAUCCCUUUCUU |
| 4 | 23904 | GUGUAGAUGGUCUUGUCUG |
| 5 | 23905 | CAGAGAGAAGACCUUGACC |
| 6 | 23906 | CACACAGAUCCCUUUCUUG |
| 7 | 23907 | ACGAACACCAUGAGGUCAA |
| 8 | 23908 | CACCAUGAGGUCAAAGGGC |
| 9 | 23909 | AAGACCUUGACCACGUAGG |
| 10 | 23910 | ACACCAUGAGGUCAAAGGG |
| 11 | 23911 | GAACACCAUGAGGUCAAAG |
| 12 | 23912 | GAAGACCUUGACCACGUAG |
| 13 | 23913 | GAGAAGACCUUGACCACGU |
| 14 | 23914 | GGGUCUUGUACACAUAGUC |
| 15 | 23915 | ACCAUGAGGUCAAAGGGCA |
| 16 | 23916 | CCAUGAGGUCAAAGGGCAU |
| 17 | 23917 | AGGAGAAUUCUGGUCUCAG |
| 18 | 23918 | UGGUAUUGAGCCAAGGCUU |
| 19 | 23919 | ACAGCCAGAGAGAAGACCU |
| 20 | 23920 | CGAAACUGGGCAGCACGUA |
| 21 | 23921 | AAUUUCUCUGUAGGCUCCA |
| 22 | 23922 | GUGCCUUGGCCUUUUCCUU |
| 23 | 23923 | CCAGAGAGAAGACCUUGAC |
| 24 | 23924 | GAAUUUCUCUGUAGGCUCC |
| 25 | 23925 | AUUUCUCUGUAGGCUCCAC |
| 26 | 23926 | CGGGCCAGUGCUCCACCCA |
| 27 | 23927 | AGACAUAGUGGCAUCCUGG |
| 28 | 23928 | UCAUUCUGAUUCCUUCCGG |
| 29 | 23929 | GUUCAUUGAGCCAACGCAC |
| 30 | 23930 | UCCAGGUAGAUGAUGAGGG |
| 31 | 23931 | AGCAAUUCUCCUCAGCACA |
| 32 | 23932 | GUAGGCUCGGAUCUUCCAC |
| 33 | 23933 | GGCCAUGAUGUACUCGUCA |
| 34 | 23934 | CAAAGUCAUUGGACAGCUG |
| 35 | 23935 | UCAUACUUGGAGAUGUAUC |
| 36 | 23936 | UUGGAGAUGUAUCUGUCAA |
| 37 | 23937 | GGUGAUGGAGUCUUUCAAA |
| 38 | 23938 | CCACAGUGUAGGAUCUCUG |
| 39 | 23939 | GCUGUGACUGUGAAACCCU |
| 40 | 23940 | CCAGAAUCUCCCACGUGGU |
| 41 | 23941 | CCUGCUUUAGUGAUGCUGC |
| 42 | 23942 | AUGAGGGUGUUCCUAUCGG |
| 43 | 23943 | UAGCAUGGUACAUUGUCAC |
| 44 | 23944 | UGAGGGUGUUCCUAUCGGA |
| 45 | 23945 | AGUAGAAUUUCUCUGUAGG |
| 46 | 23946 | UGGUGAACUUUGAAAGCUA |
| 47 | 23947 | CCCAUGUUGACGAGUUCCG |
| 48 | 23948 | AGAUGCAGGUAAUUGUUGG |
| 49 | 23949 | GGUACCUGGUACAGAUCUC |
| 50 | 23950 | GUAAUUGUUGGAGUUGCCC |
| 51 | 23951 | UAAUUGUUGGAGUUGCCCA |
| 52 | 23952 | UCGCCAUCCUGGAUCCCGA |
| 53 | 23953 | AGAAUUUCUCUGUAGGCUC |
| 54 | 23954 | UCAAAGUCUUUUAGCUGCA |
| 55 | 23955 | ACGAGUUCCGGAAUGUCCC |
| 56 | 23956 | GAAGCAAUUCUCCUCAGCA |
| 57 | 23957 | AAACGAUGUUCUCUUCUGC |
| 58 | 23958 | UGGAUCCCGAAGAUGACAA |
| 59 | 23959 | CAGAGCUUGUUCAGCUUUC |
| 60 | 23960 | AUAGACAUAGUGGCAUCCU |
| 61 | 23961 | AGGUAAUUGUUGGAGUUGC |
| 62 | 23962 | UCUGAUUCCUUCCGGCACG |
| 63 | 23963 | UGAAACCCUCAUUUUCCUU |
| 64 | 23964 | GAUCAUAGUGUUCUUGGCA |
| 65 | 23965 | GGUGCUGGUUUUAUGGUGA |
| 66 | 23966 | CAAAGGGCAUUCCUGGUUU |
| 67 | 23967 | UCCAGGUUACUCCUGGCCA |
| 68 | 23968 | AAAGUCUUUUAGCUGCAGU |
| 69 | 23969 | CUGGGUUGUCUGAAGGCCA |
| 70 | 23970 | UCCAGCUCAUACUUGGAGA |
| 71 | 23971 | AGAAGUCCUGCAUUACUGU |
| 72 | 23972 | CCAGAUCUUACUCUGCGUC |
| 73 | 23973 | CGGGCUUCUGCUUCUCCAG |
| 74 | 23974 | GCUGGUUUUAUGGUGACCU |
| 75 | 23975 | GGGCACCCAAAGACAACCA |
| 76 | 23976 | GAGCUCUUGGUUCUGCCGG |
| 77 | 23977 | AGGAAGUUGACGUUGAGGG |
| 78 | 23978 | GGCAGAGCUGGGUUGUCUG |
| 79 | 23979 | CAUAGUCCACUCCUGGCUC |
| 80 | 23980 | GUCGAAUUUAUUACAGGUG |
| 81 | 23981 | UAGAAUUUCUCUGUAGGCU |
| 82 | 23982 | UAGUGUUCUUGGCAUCCUG |
| 83 | 23983 | GGAAACGAUGUUCUCUUCU |
| 84 | 23984 | UAGUAGGCUCGGAUCUUCC |
| 85 | 23985 | UUCUCCUCAGCACAGCGGC |
| 86 | 23986 | GUGCGCACCGUGAUGCUCA |
| 87 | 23987 | AUGUACUCGUCAAAGUCAU |
| 88 | 23988 | GCCGUGAGGGCCAUGUCUU |
| 89 | 23989 | GGGUUCUCAAUGUUGACCA |
| 90 | 23990 | CCUGACACCGUCACUGAUG |
| 91 | 23991 | UAUGACCUCGAAACUGGGC |
| 92 | 23992 | UUGAGGUCGAAUUUAUUAC |
| 93 | 23993 | CCUCAUUUUCCUUGGUCUC |
| 94 | 23994 | GACUUUUGUAUGAAGCAAU |
| 95 | 23995 | AGAGUGUGAGACCUUGUCC |
| 96 | 23996 | UCGAAUUUAUUACAGGUGA |
| 97 | 23997 | CCAACCUGCACCUCAUCCG |
| 98 | 23998 | UCAGAGUGUGAGACCUUGU |
| 99 | 23999 | UAUCUCUGUUCAUUGAGCC |
| 100 | 24000 | AAGAAGUCCUGCAUUACUG |
| 101 | 24001 | UACAGAUCUCAAGGAUCAU |
| 102 | 24002 | UCGGAUCUUCCACUGGCCC |
| 103 | 24003 | GAAGUCUCCUGCUUUAGUG |
| 104 | 24004 | AAGCAAUUCUCCUCAGCAC |
| 105 | 24005 | CGAAUUUAUUACAGGUGAG |
| 106 | 24006 | UCCAGGCUGGAUAAGCUCU |
| 107 | 24007 | UAGUAGCGGAUCUUGGCCU |
| 108 | 24008 | UCCAGGUUGUAAUAGGCGU |
| 109 | 24009 | GUCAUCAUGGAUAUGUCCA |
| 110 | 24010 | UAUUGGUGAACUUUGAAAG |
| 111 | 24011 | AACAGAGUAGGGUAGCCGC |
| 112 | 24012 | CAUAGUGGCAUCCUGGUCU |
| 113 | 24013 | UUAUCUUUGGCUGUGGUCA |
| 114 | 24014 | AGGGCAUAGGAUGUGGCCU |
| 115 | 24015 | GCCUCUUUUCUGUUUCCGG |
| 116 | 24016 | GAUCGCAGGAGGCUGGCAG |
| 117 | 24017 | ACAUAGUCCACUCCUGGCU |
| 118 | 24018 | CCCAGAUCUUACUCUGCGU |
| 119 | 24019 | GAAACCCUCAUUUUCCUUG |
| 120 | 24020 | GUUCUGCCGGUAAUUGUAG |
| 121 | 24021 | AGUCAUCCUCAGAGUGUGA |
| 122 | 24022 | AGGGACUUCCUGACACCGU |
| 123 | 24023 | ACGUACUCCUUCACCUCAA |
| 124 | 24024 | GAGAAUUCUGGUCUCAGAC |
| 125 | 24025 | AACACCAUGAAGGUGGCCU |
| 126 | 24026 | CCAAGGCUUGGAACACCAU |
| 127 | 24027 | UAUCUUUGGCUGUGGUCAG |
| 128 | 24028 | UGUAGUUGCAGCAGUCCAG |
| 129 | 24029 | AAACUGGGCAGCACGUACU |
| 130 | 24030 | CGUAGUAUCUCUGUUCAUU |
| 131 | 24031 | GUAGGCUCCACUAUGACCU |
| 132 | 24032 | CAGGUAGGUGUAGUAGCGG |
| 133 | 24033 | ACAAAGGCCGUGAGGGCCA |
| 134 | 24034 | UAGAACCGGGUACAGCUUU |
| 135 | 24035 | GGGCAUAGGAUGUGGCCUC |
| 136 | 24036 | UGGUGAUGGAGUCUUUCAA |
| 137 | 24037 | AUGACCUCGAAACUGGGCA |
| 138 | 24038 | AAACCCUCAUUUUCCUUGG |
| 139 | 24039 | UCAAUGGCCAUGAUGUACU |
| 140 | 24040 | UCGUCAAAGUCAUUGGACA |
| 141 | 24041 | CCUCACCUUGAGCUCUUGG |
| 142 | 24042 | CCAGGAUCAGCCAUUUAAC |
| 143 | 24043 | GAAACGAUGUUCUCUUCUG |
| 144 | 24044 | CCUGGGAAGUCGUGGACAG |
| 145 | 24045 | AGAAGGCUUUGUCCAGCUC |
| 146 | 24046 | CUGACACCGUCACUGAUGA |
| 147 | 24047 | GAGAUGCAGGUAAUUGUUG |
| 148 | 24048 | UGACAAAGGCAGUUCCCUC |
| 149 | 24049 | GUCAAAGUCUUUUAGCUGC |
| 150 | 24050 | AGAAUCUCCCACGUGGUGA |
| 151 | 24051 | ACCAGUCGGGUCUUGUACA |
| 152 | 24052 | UGUUCUUGGCAUCCUGAGG |
| 153 | 24053 | AGUAGUUCCACCCUCACCU |
| 154 | 24054 | CCAGGUUGUAAUAGGCGUA |
| 155 | 24055 | GGGCGCAUCCUCCUGGAAG |
| 156 | 24056 | CAGCGGUUCUUAUCUUUGG |
| 157 | 24057 | UGCAUUACUGUGACCUCGA |
| 158 | 24058 | CCUCAAACUCAGUGGAGAA |
| 159 | 24059 | GGAGAAGGCUUUGUCCAGC |
| 160 | 24060 | CUGGAUGAAGAGGUACCCG |
| 161 | 24061 | UGGAUUGUGGAGUAGUUCC |
| 162 | 24062 | UCAUCCAGGUUACUCCUGG |
| 163 | 24063 | UUCCACCCUCACCUUGAGC |
| 164 | 24064 | UUGGCUUCAAGGAAGUCUC |
| 165 | 24065 | GAGAAGGCUUUGUCCAGCU |
| 166 | 24066 | CGGUGCUGGUUUUAUGGUG |
| 167 | 24067 | GCCACCACCGUAGUAUCUC |
| 168 | 24068 | UGGCUCACAGGCCUUGUCC |
| 169 | 24069 | GUACAGAUCUCAAGGAUCA |
| 170 | 24070 | CUCUGUAGGUUCAUGUAGU |
| 171 | 24071 | CCACAGUUUUGUUCAUUCU |
| 172 | 24072 | GCCAAGGCUUGGAACACCA |
| 173 | 24073 | UUGGAGUUGCCCACGGUGC |
| 174 | 24074 | UGAUCGCAGGAGGCUGGCA |
| 175 | 24075 | CAGAAUCUCCCACGUGGUG |
| 176 | 24076 | CCAUGUUGACGAGUUCCGG |
| 177 | 24077 | AAUAUAUUCAUGAGCUUCG |
| 178 | 24078 | GAGCUUGUUCAGCUUUCCA |
| 179 | 24079 | AAUGAUGUCCUCAUCCAGG |
| 180 | 24080 | UUGUAUGAAGCAAUUCUCC |
| 181 | 24081 | CCUUGGUCUCUUCUGAUCG |
| 182 | 24082 | CGGUGAUGGUGACCUCCAG |
| 183 | 24083 | UGGAUAAGCUCUACAUUAA |
| 184 | 24084 | UGCACCUCAUCCGAGCCUG |
| 185 | 24085 | GCGUAAUCCUUCCCACUGC |
| 186 | 24086 | AGCCAACGCACGACGGGAG |
| 187 | 24087 | UCAAGGAUCAUAGUGUUCU |
| 188 | 24088 | UGACCUCGAAACUGGGCAG |
| 189 | 24089 | CCACCACGUCCCAGAUCUU |
| 190 | 24090 | GUUGAUGCUGAGUUUGGCC |
| 191 | 24091 | ACAGUUUUGUUCAUUCUGA |
| 192 | 24092 | CUGGAUUGUGGAGUAGUUC |
| 193 | 24093 | CAAGGAAGUCUCCUGCUUU |
| 194 | 24094 | UGGUCUCUUCUGAUCGCAG |
| 195 | 24095 | UAGGCUCCACUAUGACCUC |
| 196 | 24096 | CCUGGGUUAGAGACUGCAC |
| 197 | 24097 | UGAGACCUUGUCCAGGUAG |
| 198 | 24098 | GUCCUUUUGGUAUUGAGCC |
| 199 | 24099 | AGCGGUUCUUAUCUUUGGC |
| 200 | 24100 | GAGAUGAGAACAAAGGCCG |
| 201 | 24101 | UAGUAGAAUUUCUCUGUAG |
| 202 | 24102 | CAAGGAGUCCUGCUUGACC |
| 203 | 24103 | GCACGUACUCCUUCACCUC |
| 204 | 24104 | CCUUGACUUCCACUUCCUG |
| 205 | 24105 | UAGACAUAGUGGCAUCCUG |
| 206 | 24106 | AGUCAAAGUCUUUUAGCUG |
| 207 | 24107 | AGGGAUUCAGGCAGGGAAA |
| 208 | 24108 | UCAUAGUGUUCUUGGCAUC |
| 209 | 24109 | GCAGCACGUACUCCUUCAC |
| 210 | 24110 | CUGUGGUCAGAAAUUUGUU |
| 211 | 24111 | CAGAGUAGGGUAGCCGCAG |
| 212 | 24112 | CCGAAGAUGACAAAGGCAG |
| 213 | 24113 | UUUUAGCUGCAGUAGGGCC |
| 214 | 24114 | CUAUCUUCAGGGUCAUCUG |
| 215 | 24115 | AAAUAUAUUCAUGAGCUUC |
| 216 | 24116 | GAACAAAGGCCGUGAGGGC |
| 217 | 24117 | UAGUUGGCUUCAAGGAAGU |
| 218 | 24118 | UUUAGCUGCAGUAGGGCCA |
| 219 | 24119 | GAGUGUGAGACCUUGUCCA |
| 220 | 24120 | AGGAACCUGGCGGUGAUGG |
| 221 | 24121 | CAUUCGUCCUCCUCGGGCC |
| 222 | 24122 | GGGCAUUCCUGGUUUGAAG |
| 223 | 24123 | GCCCACGGUGCUGUAGGGC |
| 224 | 24124 | UCAGACUCGGUGUCCGGGA |
| 225 | 24125 | GUCCACUCCUGGCUCACAG |
| 226 | 24126 | AUGAAGUCGGUGGUGAUGG |
| 227 | 24127 | GCAGUUCCCUCCACUUUCU |
| 228 | 24128 | CUUGAGCUCUUGGUUCUGC |
| 229 | 24129 | CAGCUUUCCAUCCUCCUUU |
| 230 | 24130 | UGCAGCGAGAUGAGAACAA |
| 231 | 24131 | CUUCAGGGUCAUCUGCUGC |
| 232 | 24132 | CCGACAAGGUGCCUUGGCC |
| 233 | 24133 | UUCUGCCGGUAAUUGUAGA |
| 234 | 24134 | CAGACUCGGUGUCCGGGAC |
| 235 | 24135 | GGCCAUGUCUUUCUCGUUG |
| 236 | 24136 | UGGAACACCAUGAAGGUGG |
| 237 | 24137 | UAGGCGUAGACCUUGACUG |
| 238 | 24138 | GUUACUCCUGGCCAGGCCC |
| 239 | 24139 | GUAGGAUCUCUGUAGGUUC |
| 240 | 24140 | UGCAGGUAAUUGUUGGAGU |
| 241 | 24141 | UGUGAAACCCUCAUUUUCC |
| 242 | 24142 | UGUAGUUGGCUUCAAGGAA |
| 243 | 24143 | AGAGUAGGGUAGCCGCAGG |
| 244 | 24144 | AUCAUAGUGUUCUUGGCAU |
| 245 | 24145 | GGAGGCUGGCAGAUUCCCA |
| 246 | 24146 | CUCAAGGAUCAUAGUGUUC |
| 247 | 24147 | AUGGCCAUGAUGUACUCGU |
| 248 | 24148 | GCAGAGCUUGUUCAGCUUU |
| 249 | 24149 | UGCACCAUGUCACUGCCUG |
| 250 | 24150 | CAGUCAUCAUGGAUAUGUC |

TABLE 1b
Nucleobase sequences of the sense strands of 250
constructs of the disclosure

| SEQ ID NO | Sense ID | 14 mer Sense |
|---|---|---|
| 251 | 13901 | AAGAUCCGAGCCUA |
| 252 | 13902 | AAGGUCUUCUCUCU |
| 253 | 13903 | AGGGAUCUGUGUGG |
| 254 | 13904 | AAGACCAUCUACAC |
| 255 | 13905 | AGGUCUUCUCUCUG |
| 256 | 13906 | AAGGGAUCUGUGUG |
| 257 | 13907 | CUCAUGGUGUUCGU |
| 258 | 13908 | UUGACCUCAUGGUG |
| 259 | 13909 | GUGGUCAAGGUCUU |
| 260 | 13910 | UGACCUCAUGGUGU |
| 261 | 13911 | ACCUCAUGGUGUUC |
| 262 | 13912 | UGGUCAAGGUCUUC |
| 263 | 13913 | GUCAAGGUCUUCUC |
| 264 | 13914 | UGUGUACAAGACCC |
| 265 | 13915 | UUUGACCUCAUGGU |
| 266 | 13916 | CUUUGACCUCAUGG |
| 267 | 13917 | ACCAGAAUUCUCCU |
| 268 | 13918 | UUGGCUCAAUACCA |
| 269 | 13919 | UUCUCUCUGGCUGU |
| 270 | 13920 | GCUGCCCAGUUUCG |
| 271 | 13921 | CCUACAGAGAAAUU |
| 272 | 13922 | AAAGGCCAAGGCAC |
| 273 | 13923 | GGUCUUCUCUCUGG |
| 274 | 13924 | CUACAGAGAAAUUC |
| 275 | 13925 | GCCUACAGAGAAAU |
| 276 | 13926 | GGAGCACUGGCCCG |
| 277 | 13927 | AUGCCACUAUGUCU |
| 278 | 13928 | AGGAAUCAGAAUGA |
| 279 | 13929 | UUGGCUCAAUGAAC |
| 280 | 13930 | AUCAUCUACCUGGA |
| 281 | 13931 | UGAGGAGAAUUGCU |
| 282 | 13932 | AGAUCCGAGCCUAC |
| 283 | 13933 | AGUACAUCAUGGCC |
| 284 | 13934 | GUCCAAUGACUUUG |
| 285 | 13935 | AUCUCCAAGUAUGA |
| 286 | 13936 | AGAUACAUCUCCAA |
| 287 | 13937 | AAGACUCCAUCACC |
| 288 | 13938 | AUCCUACACUGUGG |
| 289 | 13939 | UUCACAGUCACAGC |
| 290 | 13940 | GUGGGAGAUUCUGG |
| 291 | 13941 | AUCACUAAAGCAGG |
| 292 | 13942 | AGGAACACCCUCAU |
| 293 | 13943 | AAUGUACCAUGCUA |
| 294 | 13944 | UAGGAACACCCUCA |
| 295 | 13945 | AGAGAAAUUCUACU |
| 296 | 13946 | UUCAAAGUUCACCA |
| 297 | 13947 | CUCGUCAACAUGGG |
| 298 | 13948 | AAUUACCUGCAUCU |
| 299 | 13949 | CUGUACCAGGUACC |
| 300 | 13950 | ACUCCAACAAUUAC |
| 301 | 13951 | AACUCCAACAAUUA |
| 302 | 13952 | AUCCAGGAUGGCGA |
| 303 | 13953 | UACAGAGAAAUUCU |
| 304 | 13954 | CUAAAAGACUUUGA |
| 305 | 13955 | AUUCCGGAACUCGU |
| 306 | 13956 | AGGAGAAUUGCUUC |
| 307 | 13957 | AGAGAACAUCGUUU |
| 308 | 13958 | AUCUUCGGGAUCCA |
| 309 | 13959 | CUGAACAAGCUCUG |
| 310 | 13960 | GCCACUAUGUCUAU |
| 311 | 13961 | UCCAACAAUUACCU |
| 312 | 13962 | CGGAAGGAAUCAGA |
| 313 | 13963 | AAAUGAGGGUUUCA |
| 314 | 13964 | AGAACACUAUGAUC |
| 315 | 13965 | AUAAAACCAGCACC |
| 316 | 13966 | AGGAAUGCCCUUUG |
| 317 | 13967 | AGGAGUAACCUGGA |
| 318 | 13968 | AGCUAAAAGACUUU |
| 319 | 13969 | UUCAGACAACCCAG |
| 320 | 13970 | AAGUAUGAGCUGGA |
| 321 | 13971 | AAUGCAGGACUUCU |
| 322 | 13972 | AGAGUAAGAUCUGG |
| 323 | 13973 | GAAGCAGAAGCCCG |
| 324 | 13974 | ACCAUAAAACCAGC |
| 325 | 13975 | GUCUUUGGGUGCCC |
| 326 | 13976 | AGAACCAAGAGCUC |
| 327 | 13977 | AACGUCAACUUCCU |
| 328 | 13978 | AACCCAGCUCUGCC |
| 329 | 13979 | AGGAGUGGACUAUG |
| 330 | 13980 | GUAAUAAAUUCGAC |
| 331 | 13981 | ACAGAGAAAUUCUA |
| 332 | 13982 | UGCCAAGAACACUA |
| 333 | 13983 | AGAACAUCGUUUCC |
| 334 | 13984 | AUCCGAGCCUACUA |
| 335 | 13985 | UGUGCUGAGGAGAA |
| 336 | 13986 | AUCACGGUGCGCAC |
| 337 | 13987 | UUUGACGAGUACAU |
| 338 | 13988 | AUGGCCCUCACGGC |
| 339 | 13989 | AACAUUGAGAACCC |
| 340 | 13990 | GUGACGGUGUCAGG |
| 341 | 13991 | GUUUCGAGGUCAUA |
| 342 | 13992 | AAAUUCGACCUCAA |
| 343 | 13993 | CAAGGAAAAUGAGG |
| 344 | 13994 | UUCAUACAAAAGUC |
| 345 | 13995 | AGGUCUCACACUCU |
| 346 | 13996 | UGUAAUAAAUUCGA |
| 347 | 13997 | GAGGUGCAGGUUGG |
| 348 | 13998 | GUCUCACACUCUGA |
| 349 | 13999 | AAUGAACAGAGAUA |
| 350 | 14000 | AUGCAGGACUUCUU |
| 351 | 14001 | CCUUGAGAUCUGUA |
| 352 | 14002 | AGUGGAAGAUCCGA |
| 353 | 14003 | AAGCAGGAGACUUC |
| 354 | 14004 | GAGGAGAAUUGCUU |
| 355 | 14005 | CUGUAAUAAAUUCG |
| 356 | 14006 | UUAUCCAGCCUGGA |
| 357 | 14007 | AAGAUCCGCUACUA |
| 358 | 14008 | UAUUACAACCUGGA |
| 359 | 14009 | AUAUCCAUGAUGAC |
| 360 | 14010 | AAAGUUCACCAAUA |
| 361 | 14011 | UACCCUACUCUGUU |
| 362 | 14012 | AGGAUGCCACUAUG |
| 363 | 14013 | ACAGCCAAAGAUAA |
| 364 | 14014 | ACAUCCUAUGCCCU |
| 365 | 14015 | AACAGAAAAGAGGC |
| 366 | 14016 | AGCCUCCUGCGAUC |
| 367 | 14017 | GGAGUGGACUAUGU |
| 368 | 14018 | GAGUAAGAUCUGGG |
| 369 | 14019 | AAAAUGAGGGUUUC |
| 370 | 14020 | AUUACCGGCAGAAC |
| 371 | 14021 | CUCUGAGGAUGACU |
| 372 | 14022 | GUCAGGAAGUCCCU |
| 373 | 14023 | GUGAAGGAGUACGU |
| 374 | 14024 | AGACCAGAAUUCUC |
| 375 | 14025 | ACCUUCAUGGUGUU |
| 376 | 14026 | GUUCCAAGCCUUGG |
| 377 | 14027 | CACAGCCAAAGAUA |
| 378 | 14028 | CUGCUGCAACUACA |
| 379 | 14029 | GUGCUGCCCAGUUU |
| 380 | 14030 | ACAGAGAUACUACG |
| 381 | 14031 | AUAGUGGAGCCUAC |
| 382 | 14032 | ACUACACCUACCUG |
| 383 | 14033 | CUCACGGCCUUUGU |
| 384 | 14034 | UGUACCCGGUUCUA |
| 385 | 14035 | CACAUCCUAUGCCC |
| 386 | 14036 | AGACUCCAUCACCA |
| 387 | 14037 | AGUUUCGAGGUCAU |
| 388 | 14038 | GAAAAUGAGGGUUU |
| 389 | 14039 | AUCAUGGCCAUUGA |
| 390 | 14040 | AAUGACUUUGACGA |
| 391 | 14041 | AGCUCAAGGUGAGG |
| 392 | 14042 | AUGGCUGAUCCUGG |
| 393 | 14043 | GAGAACAUCGUUUC |
| 394 | 14044 | CACGACUUCCCAGG |
| 395 | 14045 | GGACAAAGCCUUCU |
| 396 | 14046 | AGUGACGGUGUCAG |
| 397 | 14047 | AUUACCUGCAUCUC |
| 398 | 14048 | AACUGCCUUUGUCA |
| 399 | 14049 | UAAAAGACUUUGAC |
| 400 | 14050 | ACGUGGGAGAUUCU |
| 401 | 14051 | AAGACCCGACUGGU |
| 402 | 14052 | GGAUGCCAAGAACA |
| 403 | 14053 | AGGGUGGAACUACU |
| 404 | 14054 | CUAUUACAACCUGG |
| 405 | 14055 | AGGAGGAUGCGCCC |
| 406 | 14056 | GAUAAGAACCGCUG |
| 407 | 14057 | GUCACAGUAAUGCA |
| 408 | 14058 | CACUGAGUUUGAGG |
| 409 | 14059 | ACAAAGCCUUCUCC |
| 410 | 14060 | ACCUCUUCAUCCAG |
| 411 | 14061 | UACUCCACAAUCCA |
| 412 | 14062 | AGUAACCUGGAUGA |
| 413 | 14063 | AGGUGAGGGUGGAA |
| 414 | 14064 | UUCCUUGAAGCCAA |
| 415 | 14065 | GACAAAGCCUUCUC |
| 416 | 14066 | UAAAACCAGCACCG |
| 417 | 14067 | ACUACGGUGGUGGC |
| 418 | 14068 | AGGCCUGUGAGCCA |
| 419 | 14069 | CUUGAGAUCUGUAC |
| 420 | 14070 | AUGAACCUACAGAG |
| 421 | 14071 | GAACAAAACUGUGG |
| 422 | 14072 | UUCCAAGCCUUGGC |
| 423 | 14073 | GUGGGCAACUCCAA |
| 424 | 14074 | GCCUCCUGCGAUCA |
| 425 | 14075 | CGUGGGAGAUUCUG |
| 426 | 14076 | ACUCGUCAACAUGG |
| 427 | 14077 | CUCAUGAAUAUAUU |
| 428 | 14078 | AGCUGAACAAGCUC |
| 429 | 14079 | AUGAGGACAUCAUU |
| 430 | 14080 | AUUGCUUCAUACAA |
| 431 | 14081 | AGAAGAGACCAAGG |
| 432 | 14082 | GGUCACCAUCACCG |
| 433 | 14083 | GUAGAGCUUAUCCA |
| 434 | 14084 | UCGGAUGAGGUGCA |
| 435 | 14085 | GGGAAGGAUUACGC |
| 436 | 14086 | GUCGUGCGUUGGCU |
| 437 | 14087 | ACUAUGAUCCUUGA |
| 438 | 14088 | CAGUUUCGAGGUCA |
| 439 | 14089 | CUGGGACGUGGUGG |
| 440 | 14090 | AACUCAGCAUCAAC |
| 441 | 14091 | AUGAACAAAACUGU |
| 442 | 14092 | ACUCCACAAUCCAG |
| 443 | 14093 | AGGAGACUUCCUUG |
| 444 | 14094 | AUCAGAAGAGACCA |
| 445 | 14095 | CAUAGUGGAGCCUA |
| 446 | 14096 | GUCUCUAACCCAGG |
| 447 | 14097 | UGGACAAGGUCUCA |
| 448 | 14098 | AAUACCAAAAGGAC |
| 449 | 14099 | AGAUAAGAACCGCU |
| 450 | 14100 | UUUGUUCUCAUCUC |
| 451 | 14101 | GAGAAAUUCUACUA |
| 452 | 14102 | AGCAGGACUCCUUG |
| 453 | 14103 | GAAGGAGUACGUGC |
| 454 | 14104 | AGUGGAAGUCAAGG |
| 455 | 14105 | UGCCACUAUGUCUA |
| 456 | 14106 | AAAAGACUUUGACU |
| 457 | 14107 | CUGCCUGAAUCCCU |
| 458 | 14108 | CAAGAACACUAUGA |
| 459 | 14109 | GGAGUACGUGCUGC |
| 460 | 14110 | AUUUCUGACCACAG |
| 461 | 14111 | GCUACCCUACUCUG |
| 462 | 14112 | UUUGUCAUCUUCGG |
| 463 | 14113 | UACUGCAGCUAAAA |
| 464 | 14114 | GACCCUGAAGAUAG |
| 465 | 14115 | UCAUGAAUAUAUUU |
| 466 | 14116 | CACGGCCUUUGUUC |
| 467 | 14117 | CUUGAAGCCAACUA |
| 468 | 14118 | CUACUGCAGCUAAA |
| 469 | 14119 | AAGGUCUCACACUC |
| 470 | 14120 | ACCGCCAGGUUCCU |
| 471 | 14121 | GAGGAGGACGAAUG |
| 472 | 14122 | AACCAGGAAUGCCC |
| 473 | 14123 | ACAGCACCGUGGGC |
| 474 | 14124 | GACACCGAGUCUGA |
| 475 | 14125 | AGCCAGGAGUGGAC |
| 476 | 14126 | ACCACCGACUUCAU |
| 477 | 14127 | GUGGAGGGAACUGC |
| 478 | 14128 | ACCAAGAGCUCAAG |
| 479 | 14129 | AGGAUGGAAAGCUG |
| 480 | 14130 | CUCAUCUCGCUGCA |
| 481 | 14131 | AGAUGACCCUGAAG |
| 482 | 14132 | AGGCACCUUGUCGG |
| 483 | 14133 | AAUUACCGGCAGAA |
| 484 | 14134 | GGACACCGAGUCUG |
| 485 | 14135 | AGAAAGACAUGGCC |
| 486 | 14136 | UUCAUGGUGUUCCA |
| 487 | 14137 | AAGGUCUACGCCUA |
| 488 | 14138 | UGGCCAGGAGUAAC |
| 489 | 14139 | UACAGAGAUCCUAC |
| 490 | 14140 | AACAAUUACCUGCA |
| 491 | 14141 | AUGAGGGUUUCACA |
| 492 | 14142 | UGAAGCCAACUACA |
| 493 | 14143 | GGCUACCCUACUCU |
| 494 | 14144 | AAGAACACUAUGAU |
| 495 | 14145 | AUCUGCCAGCCUCC |
| 496 | 14146 | CUAUGAUCCUUGAG |
| 497 | 14147 | UACAUCAUGGCCAU |
| 498 | 14148 | UGAACAAGCUCUGC |
| 499 | 14149 | AGUGACAUGGUGCA |
| 500 | 14150 | AUCCAUGAUGACUG |

[0387] Table 2 below shows the nucleobase sequences of the 250 hairpin constructs of the disclosure as selected in accordance with the Examples. The nucleobase sequences are a direct fusion of the antisense sequences of Table 1a with the corresponding sense sequences of Table 1b.

TABLE 2
Nucleobase sequences of 250 constructs in which the sense and the antisense
sequences of tables 1a and 1b are combined.

| SEQ ID NO: | Sense ID | Antisense ID | Sequence of 33 mer Hairpin |
|---|---|---|---|
| 501 | 13901 | 23901 | UAGGCUCGGAUCUUCCACUAAGAUCCGAGCCUA |
| 502 | 13902 | 23902 | AGAGAGAAGACCUUGACCAAAGGUCUUCUCUCU |
| 503 | 13903 | 23903 | CCACACAGAUCCCUUUCUUAGGGAUCUGUGUGG |
| 504 | 13904 | 23904 | GUGUAGAUGGUCUUGUCUGAAGACCAUCUACAC |
| 505 | 13905 | 23905 | CAGAGAGAAGACCUUGACCAGGUCUUCUCUCUG |
| 506 | 13906 | 23906 | CACACAGAUCCCUUUCUUGAAGGGAUCUGUGUG |
| 507 | 13907 | 23907 | ACGAACACCAUGAGGUCAACUCAUGGUGUUCGU |
| 508 | 13908 | 23908 | CACCAUGAGGUCAAAGGGCUUGACCUCAUGGUG |
| 509 | 13909 | 23909 | AAGACCUUGACCACGUAGGGUGGUCAAGGUCUU |
| 510 | 13910 | 23910 | ACACCAUGAGGUCAAAGGGUGACCUCAUGGUGU |
| 511 | 13911 | 23911 | GAACACCAUGAGGUCAAAGACCUCAUGGUGUUC |
| 512 | 13912 | 23912 | GAAGACCUUGACCACGUAGUGGUCAAGGUCUUC |
| 513 | 13913 | 23913 | GAGAAGACCUUGACCACGUGUCAAGGUCUUCUC |
| 514 | 13914 | 23914 | GGGUCUUGUACACAUAGUCUGUGUACAAGACCC |
| 515 | 13915 | 23915 | ACCAUGAGGUCAAAGGGCAUUUGACCUCAUGGU |
| 516 | 13916 | 23916 | CCAUGAGGUCAAAGGGCAUCUUUGACCUCAUGG |
| 517 | 13917 | 23917 | AGGAGAAUUCUGGUCUCAGACCAGAAUUCUCCU |
| 518 | 13918 | 23918 | UGGUAUUGAGCCAAGGCUUUUGGCUCAAUACCA |
| 519 | 13919 | 23919 | ACAGCCAGAGAGAAGACCUUUCUCUCUGGCUGU |
| 520 | 13920 | 23920 | CGAAACUGGGCAGCACGUAGCUGCCCAGUUUCG |
| 521 | 13921 | 23921 | AAUUUCUCUGUAGGCUCCACCUACAGAGAAAUU |
| 522 | 13922 | 23922 | GUGCCUUGGCCUUUUCCUUAAAGGCCAAGGCAC |
| 523 | 13923 | 23923 | CCAGAGAGAAGACCUUGACGGUCUUCUCUCUGG |
| 524 | 13924 | 23924 | GAAUUUCUCUGUAGGCUCCCUACAGAGAAAUUC |
| 525 | 13925 | 23925 | AUUUCUCUGUAGGCUCCACGCCUACAGAGAAAU |
| 526 | 13926 | 23926 | CGGGCCAGUGCUCCACCCAGGAGCACUGGCCCG |
| 527 | 13927 | 23927 | AGACAUAGUGGCAUCCUGGAUGCCACUAUGUCU |
| 528 | 13928 | 23928 | UCAUUCUGAUUCCUUCCGGAGGAAUCAGAAUGA |
| 529 | 13929 | 23929 | GUUCAUUGAGCCAACGCACUUGGCUCAAUGAAC |
| 530 | 13930 | 23930 | UCCAGGUAGAUGAUGAGGGAUCAUCUACCUGGA |
| 531 | 13931 | 23931 | AGCAAUUCUCCUCAGCACAUGAGGAGAAUUGCU |
| 532 | 13932 | 23932 | GUAGGCUCGGAUCUUCCACAGAUCCGAGCCUAC |
| 533 | 13933 | 23933 | GGCCAUGAUGUACUCGUCAAGUACAUCAUGGCC |
| 534 | 13934 | 23934 | CAAAGUCAUUGGACAGCUGGUCCAAUGACUUUG |
| 535 | 13935 | 23935 | UCAUACUUGGAGAUGUAUCAUCUCCAAGUAUGA |
| 536 | 13936 | 23936 | UUGGAGAUGUAUCUGUCAAAGAUACAUCUCCAA |
| 537 | 13937 | 23937 | GGUGAUGGAGUCUUUCAAAAAGACUCCAUCACC |
| 538 | 13938 | 23938 | CCACAGUGUAGGAUCUCUGAUCCUACACUGUGG |
| 539 | 13939 | 23939 | GCUGUGACUGUGAAACCCUUUCACAGUCACAGC |
| 540 | 13940 | 23940 | CCAGAAUCUCCCACGUGGUGUGGGAGAUUCUGG |
| 541 | 13941 | 23941 | CCUGCUUUAGUGAUGCUGCAUCACUAAAGCAGG |
| 542 | 13942 | 23942 | AUGAGGGUGUUCCUAUCGGAGGAACACCCUCAU |
| 543 | 13943 | 23943 | UAGCAUGGUACAUUGUCACAAUGUACCAUGCUA |
| 544 | 13944 | 23944 | UGAGGGUGUUCCUAUCGGAUAGGAACACCCUCA |
| 545 | 13945 | 23945 | AGUAGAAUUUCUCUGUAGGAGAGAAAUUCUACU |
| 546 | 13946 | 23946 | UGGUGAACUUUGAAAGCUAUUCAAAGUUCACCA |
| 547 | 13947 | 23947 | CCCAUGUUGACGAGUUCCGCUCGUCAACAUGGG |
| 548 | 13948 | 23948 | AGAUGCAGGUAAUUGUUGGAAUUACCUGCAUCU |
| 549 | 13949 | 23949 | GGUACCUGGUACAGAUCUCCUGUACCAGGUACC |
| 550 | 13950 | 23950 | GUAAUUGUUGGAGUUGCCCACUCCAACAAUUAC |
| 551 | 13951 | 23951 | UAAUUGUUGGAGUUGCCCAAACUCCAACAAUUA |
| 552 | 13952 | 23952 | UCGCCAUCCUGGAUCCCGAAUCCAGGAUGGCGA |
| 553 | 13953 | 23953 | AGAAUUUCUCUGUAGGCUCUACAGAGAAAUUCU |
| 554 | 13954 | 23954 | UCAAAGUCUUUUAGCUGCACUAAAAGACUUUGA |
| 555 | 13955 | 23955 | ACGAGUUCCGGAAUGUCCCAUUCCGGAACUCGU |
| 556 | 13956 | 23956 | GAAGCAAUUCUCCUCAGCAAGGAGAAUUGCUUC |
| 557 | 13957 | 23957 | AAACGAUGUUCUCUUCUGCAGAGAACAUCGUUU |
| 558 | 13958 | 23958 | UGGAUCCCGAAGAUGACAAAUCUUCGGGAUCCA |
| 559 | 13959 | 23959 | CAGAGCUUGUUCAGCUUUCCUGAACAAGCUCUG |
| 560 | 13960 | 23960 | AUAGACAUAGUGGCAUCCUGCCACUAUGUCUAU |
| 561 | 13961 | 23961 | AGGUAAUUGUUGGAGUUGCUCCAACAAUUACCU |
| 562 | 13962 | 23962 | UCUGAUUCCUUCCGGCACGCGGAAGGAAUCAGA |
| 563 | 13963 | 23963 | UGAAACCCUCAUUUUCCUUAAAUGAGGGUUUCA |
| 564 | 13964 | 23964 | GAUCAUAGUGUUCUUGGCAAGAACACUAUGAUC |
| 565 | 13965 | 23965 | GGUGCUGGUUUUAUGGUGAAUAAAACCAGCACC |
| 566 | 13966 | 23966 | CAAAGGGCAUUCCUGGUUUAGGAAUGCCCUUUG |
| 567 | 13967 | 23967 | UCCAGGUUACUCCUGGCCAAGGAGUAACCUGGA |
| 568 | 13968 | 23968 | AAAGUCUUUUAGCUGCAGUAGCUAAAAGACUUU |
| 569 | 13969 | 23969 | CUGGGUUGUCUGAAGGCCAUUCAGACAACCCAG |
| 570 | 13970 | 23970 | UCCAGCUCAUACUUGGAGAAAGUAUGAGCUGGA |
| 571 | 13971 | 23971 | AGAAGUCCUGCAUUACUGUAAUGCAGGACUUCU |
| 572 | 13972 | 23972 | CCAGAUCUUACUCUGCGUCAGAGUAAGAUCUGG |
| 573 | 13973 | 23973 | CGGGCUUCUGCUUCUCCAGGAAGCAGAAGCCCG |
| 574 | 13974 | 23974 | GCUGGUUUUAUGGUGACCUACCAUAAAACCAGC |
| 575 | 13975 | 23975 | GGGCACCCAAAGACAACCAGUCUUUGGGUGCCC |
| 576 | 13976 | 23976 | GAGCUCUUGGUUCUGCCGGAGAACCAAGAGCUC |
| 577 | 13977 | 23977 | AGGAAGUUGACGUUGAGGGAACGUCAACUUCCU |
| 578 | 13978 | 23978 | GGCAGAGCUGGGUUGUCUGAACCCAGCUCUGCC |
| 579 | 13979 | 23979 | CAUAGUCCACUCCUGGCUCAGGAGUGGACUAUG |
| 580 | 13980 | 23980 | GUCGAAUUUAUUACAGGUGGUAAUAAAUUCGAC |
| 581 | 13981 | 23981 | UAGAAUUUCUCUGUAGGCUACAGAGAAAUUCUA |
| 582 | 13982 | 23982 | UAGUGUUCUUGGCAUCCUGUGCCAAGAACACUA |
| 583 | 13983 | 23983 | GGAAACGAUGUUCUCUUCUAGAACAUCGUUUCC |
| 584 | 13984 | 23984 | UAGUAGGCUCGGAUCUUCCAUCCGAGCCUACUA |
| 585 | 13985 | 23985 | UUCUCCUCAGCACAGCGGCUGUGCUGAGGAGAA |
| 586 | 13986 | 23986 | GUGCGCACCGUGAUGCUCAAUCACGGUGCGCAC |
| 587 | 13987 | 23987 | AUGUACUCGUCAAAGUCAUUUUGACGAGUACAU |
| 588 | 13988 | 23988 | GCCGUGAGGGCCAUGUCUUAUGGCCCUCACGGC |
| 589 | 13989 | 23989 | GGGUUCUCAAUGUUGACCAAACAUUGAGAACCC |
| 590 | 13990 | 23990 | CCUGACACCGUCACUGAUGGUGACGGUGUCAGG |
| 591 | 13991 | 23991 | UAUGACCUCGAAACUGGGCGUUUCGAGGUCAUA |
| 592 | 13992 | 23992 | UUGAGGUCGAAUUUAUUACAAAUUCGACCUCAA |
| 593 | 13993 | 23993 | CCUCAUUUUCCUUGGUCUCCAAGGAAAAUGAGG |
| 594 | 13994 | 23994 | GACUUUUGUAUGAAGCAAUUUCAUACAAAAGUC |
| 595 | 13995 | 23995 | AGAGUGUGAGACCUUGUCCAGGUCUCACACUCU |
| 596 | 13996 | 23996 | UCGAAUUUAUUACAGGUGAUGUAAUAAAUUCGA |
| 597 | 13997 | 23997 | CCAACCUGCACCUCAUCCGGAGGUGCAGGUUGG |
| 598 | 13998 | 23998 | UCAGAGUGUGAGACCUUGUGUCUCACACUCUGA |
| 599 | 13999 | 23999 | UAUCUCUGUUCAUUGAGCCAAUGAACAGAGAUA |
| 600 | 14000 | 24000 | AAGAAGUCCUGCAUUACUGAUGCAGGACUUCUU |
| 601 | 14001 | 24001 | UACAGAUCUCAAGGAUCAUCCUUGAGAUCUGUA |
| 602 | 14002 | 24002 | UCGGAUCUUCCACUGGCCCAGUGGAAGAUCCGA |
| 603 | 14003 | 24003 | GAAGUCUCCUGCUUUAGUGAAGCAGGAGACUUC |
| 604 | 14004 | 24004 | AAGCAAUUCUCCUCAGCACGAGGAGAAUUGCUU |
| 605 | 14005 | 24005 | CGAAUUUAUUACAGGUGAGCUGUAAUAAAUUCG |
| 606 | 14006 | 24006 | UCCAGGCUGGAUAAGCUCUUUAUCCAGCCUGGA |
| 607 | 14007 | 24007 | UAGUAGCGGAUCUUGGCCUAAGAUCCGCUACUA |
| 608 | 14008 | 24008 | UCCAGGUUGUAAUAGGCGUUAUUACAACCUGGA |
| 609 | 14009 | 24009 | GUCAUCAUGGAUAUGUCCAAUAUCCAUGAUGAC |
| 610 | 14010 | 24010 | UAUUGGUGAACUUUGAAAGAAAGUUCACCAAUA |
| 611 | 14011 | 24011 | AACAGAGUAGGGUAGCCGCUACCCUACUCUGUU |
| 612 | 14012 | 24012 | CAUAGUGGCAUCCUGGUCUAGGAUGCCACUAUG |
| 613 | 14013 | 24013 | UUAUCUUUGGCUGUGGUCAACAGCCAAAGAUAA |
| 614 | 14014 | 24014 | AGGGCAUAGGAUGUGGCCUACAUCCUAUGCCCU |
| 615 | 14015 | 24015 | GCCUCUUUUCUGUUUCCGGAACAGAAAAGAGGC |
| 616 | 14016 | 24016 | GAUCGCAGGAGGCUGGCAGAGCCUCCUGCGAUC |
| 617 | 14017 | 24017 | ACAUAGUCCACUCCUGGCUGGAGUGGACUAUGU |
| 618 | 14018 | 24018 | CCCAGAUCUUACUCUGCGUGAGUAAGAUCUGGG |
| 619 | 14019 | 24019 | GAAACCCUCAUUUUCCUUGAAAAUGAGGGUUUC |
| 620 | 14020 | 24020 | GUUCUGCCGGUAAUUGUAGAUUACCGGCAGAAC |
| 621 | 14021 | 24021 | AGUCAUCCUCAGAGUGUGACUCUGAGGAUGACU |
| 622 | 14022 | 24022 | AGGGACUUCCUGACACCGUGUCAGGAAGUCCCU |
| 623 | 14023 | 24023 | ACGUACUCCUUCACCUCAAGUGAAGGAGUACGU |
| 624 | 14024 | 24024 | GAGAAUUCUGGUCUCAGACAGACCAGAAUUCUC |
| 625 | 14025 | 24025 | AACACCAUGAAGGUGGCCUACCUUCAUGGUGUU |
| 626 | 14026 | 24026 | CCAAGGCUUGGAACACCAUGUUCCAAGCCUUGG |
| 627 | 14027 | 24027 | UAUCUUUGGCUGUGGUCAGCACAGCCAAAGAUA |
| 628 | 14028 | 24028 | UGUAGUUGCAGCAGUCCAGCUGCUGCAACUACA |
| 629 | 14029 | 24029 | AAACUGGGCAGCACGUACUGUGCUGCCCAGUUU |
| 630 | 14030 | 24030 | CGUAGUAUCUCUGUUCAUUACAGAGAUACUACG |
| 631 | 14031 | 24031 | GUAGGCUCCACUAUGACCUAUAGUGGAGCCUAC |
| 632 | 14032 | 24032 | CAGGUAGGUGUAGUAGCGGACUACACCUACCUG |
| 633 | 14033 | 24033 | ACAAAGGCCGUGAGGGCCACUCACGGCCUUUGU |
| 634 | 14034 | 24034 | UAGAACCGGGUACAGCUUUUGUACCCGGUUCUA |
| 635 | 14035 | 24035 | GGGCAUAGGAUGUGGCCUCCACAUCCUAUGCCC |
| 636 | 14036 | 24036 | UGGUGAUGGAGUCUUUCAAAGACUCCAUCACCA |
| 637 | 14037 | 24037 | AUGACCUCGAAACUGGGCAAGUUUCGAGGUCAU |
| 638 | 14038 | 24038 | AAACCCUCAUUUUCCUUGGGAAAAUGAGGGUUU |
| 639 | 14039 | 24039 | UCAAUGGCCAUGAUGUACUAUCAUGGCCAUUGA |
| 640 | 14040 | 24040 | UCGUCAAAGUCAUUGGACAAAUGACUUUGACGA |
| 641 | 14041 | 24041 | CCUCACCUUGAGCUCUUGGAGCUCAAGGUGAGG |
| 642 | 14042 | 24042 | CCAGGAUCAGCCAUUUAACAUGGCUGAUCCUGG |
| 643 | 14043 | 24043 | GAAACGAUGUUCUCUUCUGGAGAACAUCGUUUC |
| 644 | 14044 | 24044 | CCUGGGAAGUCGUGGACAGCACGACUUCCCAGG |
| 645 | 14045 | 24045 | AGAAGGCUUUGUCCAGCUCGGACAAAGCCUUCU |
| 646 | 14046 | 24046 | CUGACACCGUCACUGAUGAAGUGACGGUGUCAG |
| 647 | 14047 | 24047 | GAGAUGCAGGUAAUUGUUGAUUACCUGCAUCUC |
| 648 | 14048 | 24048 | UGACAAAGGCAGUUCCCUCAACUGCCUUUGUCA |
| 649 | 14049 | 24049 | GUCAAAGUCUUUUAGCUGCUAAAAGACUUUGAC |
| 650 | 14050 | 24050 | AGAAUCUCCCACGUGGUGAACGUGGGAGAUUCU |
| 651 | 14051 | 24051 | ACCAGUCGGGUCUUGUACAAAGACCCGACUGGU |
| 652 | 14052 | 24052 | UGUUCUUGGCAUCCUGAGGGGAUGCCAAGAACA |
| 653 | 14053 | 24053 | AGUAGUUCCACCCUCACCUAGGGUGGAACUACU |
| 654 | 14054 | 24054 | CCAGGUUGUAAUAGGCGUACUAUUACAACCUGG |
| 655 | 14055 | 24055 | GGGCGCAUCCUCCUGGAAGAGGAGGAUGCGCCC |
| 656 | 14056 | 24056 | CAGCGGUUCUUAUCUUUGGGAUAAGAACCGCUG |
| 657 | 14057 | 24057 | UGCAUUACUGUGACCUCGAGUCACAGUAAUGCA |
| 658 | 14058 | 24058 | CCUCAAACUCAGUGGAGAACACUGAGUUUGAGG |
| 659 | 14059 | 24059 | GGAGAAGGCUUUGUCCAGCACAAAGCCUUCUCC |
| 660 | 14060 | 24060 | CUGGAUGAAGAGGUACCCGACCUCUUCAUCCAG |
| 661 | 14061 | 24061 | UGGAUUGUGGAGUAGUUCCUACUCCACAAUCCA |
| 662 | 14062 | 24062 | UCAUCCAGGUUACUCCUGGAGUAACCUGGAUGA |
| 663 | 14063 | 24063 | UUCCACCCUCACCUUGAGCAGGUGAGGGUGGAA |
| 664 | 14064 | 24064 | UUGGCUUCAAGGAAGUCUCUUCCUUGAAGCCAA |
| 665 | 14065 | 24065 | GAGAAGGCUUUGUCCAGCUGACAAAGCCUUCUC |
| 666 | 14066 | 24066 | CGGUGCUGGUUUUAUGGUGUAAAACCAGCACCG |
| 667 | 14067 | 24067 | GCCACCACCGUAGUAUCUCACUACGGUGGUGGC |
| 668 | 14068 | 24068 | UGGCUCACAGGCCUUGUCCAGGCCUGUGAGCCA |
| 669 | 14069 | 24069 | GUACAGAUCUCAAGGAUCACUUGAGAUCUGUAC |
| 670 | 14070 | 24070 | CUCUGUAGGUUCAUGUAGUAUGAACCUACAGAG |
| 671 | 14071 | 24071 | CCACAGUUUUGUUCAUUCUGAACAAAACUGUGG |
| 672 | 14072 | 24072 | GCCAAGGCUUGGAACACCAUUCCAAGCCUUGGC |
| 673 | 14073 | 24073 | UUGGAGUUGCCCACGGUGCGUGGGCAACUCCAA |
| 674 | 14074 | 24074 | UGAUCGCAGGAGGCUGGCAGCCUCCUGCGAUCA |
| 675 | 14075 | 24075 | CAGAAUCUCCCACGUGGUGCGUGGGAGAUUCUG |
| 676 | 14076 | 24076 | CCAUGUUGACGAGUUCCGGACUCGUCAACAUGG |
| 677 | 14077 | 24077 | AAUAUAUUCAUGAGCUUCGCUCAUGAAUAUAUU |
| 678 | 14078 | 24078 | GAGCUUGUUCAGCUUUCCAAGCUGAACAAGCUC |
| 679 | 14079 | 24079 | AAUGAUGUCCUCAUCCAGGAUGAGGACAUCAUU |
| 680 | 14080 | 24080 | UUGUAUGAAGCAAUUCUCCAUUGCUUCAUACAA |
| 681 | 14081 | 24081 | CCUUGGUCUCUUCUGAUCGAGAAGAGACCAAGG |
| 682 | 14082 | 24082 | CGGUGAUGGUGACCUCCAGGGUCACCAUCACCG |
| 683 | 14083 | 24083 | UGGAUAAGCUCUACAUUAAGUAGAGCUUAUCCA |
| 684 | 14084 | 24084 | UGCACCUCAUCCGAGCCUGUCGGAUGAGGUGCA |
| 685 | 14085 | 24085 | GCGUAAUCCUUCCCACUGCGGGAAGGAUUACGC |
| 686 | 14086 | 24086 | AGCCAACGCACGACGGGAGGUCGUGCGUUGGCU |
| 687 | 14087 | 24087 | UCAAGGAUCAUAGUGUUCUACUAUGAUCCUUGA |
| 688 | 14088 | 24088 | UGACCUCGAAACUGGGCAGCAGUUUCGAGGUCA |
| 689 | 14089 | 24089 | CCACCACGUCCCAGAUCUUCUGGGACGUGGUGG |
| 690 | 14090 | 24090 | GUUGAUGCUGAGUUUGGCCAACUCAGCAUCAAC |
| 691 | 14091 | 24091 | ACAGUUUUGUUCAUUCUGAAUGAACAAAACUGU |
| 692 | 14092 | 24092 | CUGGAUUGUGGAGUAGUUCACUCCACAAUCCAG |
| 693 | 14093 | 24093 | CAAGGAAGUCUCCUGCUUUAGGAGACUUCCUUG |
| 694 | 14094 | 24094 | UGGUCUCUUCUGAUCGCAGAUCAGAAGAGACCA |
| 695 | 14095 | 24095 | UAGGCUCCACUAUGACCUCCAUAGUGGAGCCUA |
| 696 | 14096 | 24096 | CCUGGGUUAGAGACUGCACGUCUCUAACCCAGG |
| 697 | 14097 | 24097 | UGAGACCUUGUCCAGGUAGUGGACAAGGUCUCA |
| 698 | 14098 | 24098 | GUCCUUUUGGUAUUGAGCCAAUACCAAAAGGAC |
| 699 | 14099 | 24099 | AGCGGUUCUUAUCUUUGGCAGAUAAGAACCGCU |
| 700 | 14100 | 24100 | GAGAUGAGAACAAAGGCCGUUUGUUCUCAUCUC |
| 701 | 14101 | 24101 | UAGUAGAAUUUCUCUGUAGGAGAAAUUCUACUA |
| 702 | 14102 | 24102 | CAAGGAGUCCUGCUUGACCAGCAGGACUCCUUG |
| 703 | 14103 | 24103 | GCACGUACUCCUUCACCUCGAAGGAGUACGUGC |
| 704 | 14104 | 24104 | CCUUGACUUCCACUUCCUGAGUGGAAGUCAAGG |
| 705 | 14105 | 24105 | UAGACAUAGUGGCAUCCUGUGCCACUAUGUCUA |
| 706 | 14106 | 24106 | AGUCAAAGUCUUUUAGCUGAAAAGACUUUGACU |
| 707 | 14107 | 24107 | AGGGAUUCAGGCAGGGAAACUGCCUGAAUCCCU |
| 708 | 14108 | 24108 | UCAUAGUGUUCUUGGCAUCCAAGAACACUAUGA |
| 709 | 14109 | 24109 | GCAGCACGUACUCCUUCACGGAGUACGUGCUGC |
| 710 | 14110 | 24110 | CUGUGGUCAGAAAUUUGUUAUUUCUGACCACAG |
| 711 | 14111 | 24111 | CAGAGUAGGGUAGCCGCAGGCUACCCUACUCUG |
| 712 | 14112 | 24112 | CCGAAGAUGACAAAGGCAGUUUGUCAUCUUCGG |
| 713 | 14113 | 24113 | UUUUAGCUGCAGUAGGGCCUACUGCAGCUAAAA |
| 714 | 14114 | 24114 | CUAUCUUCAGGGUCAUCUGGACCCUGAAGAUAG |
| 715 | 14115 | 24115 | AAAUAUAUUCAUGAGCUUCUCAUGAAUAUAUUU |
| 716 | 14116 | 24116 | GAACAAAGGCCGUGAGGGCCACGGCCUUUGUUC |
| 717 | 14117 | 24117 | UAGUUGGCUUCAAGGAAGUCUUGAAGCCAACUA |
| 718 | 14118 | 24118 | UUUAGCUGCAGUAGGGCCACUACUGCAGCUAAA |
| 719 | 14119 | 24119 | GAGUGUGAGACCUUGUCCAAAGGUCUCACACUC |
| 720 | 14120 | 24120 | AGGAACCUGGCGGUGAUGGACCGCCAGGUUCCU |
| 721 | 14121 | 24121 | CAUUCGUCCUCCUCGGGCCGAGGAGGACGAAUG |
| 722 | 14122 | 24122 | GGGCAUUCCUGGUUUGAAGAACCAGGAAUGCCC |
| 723 | 14123 | 24123 | GCCCACGGUGCUGUAGGGCACAGCACCGUGGGC |
| 724 | 14124 | 24124 | UCAGACUCGGUGUCCGGGAGACACCGAGUCUGA |
| 725 | 14125 | 24125 | GUCCACUCCUGGCUCACAGAGCCAGGAGUGGAC |
| 726 | 14126 | 24126 | AUGAAGUCGGUGGUGAUGGACCACCGACUUCAU |
| 727 | 14127 | 24127 | GCAGUUCCCUCCACUUUCUGUGGAGGGAACUGC |
| 728 | 14128 | 24128 | CUUGAGCUCUUGGUUCUGCACCAAGAGCUCAAG |
| 729 | 14129 | 24129 | CAGCUUUCCAUCCUCCUUUAGGAUGGAAAGCUG |
| 730 | 14130 | 24130 | UGCAGCGAGAUGAGAACAACUCAUCUCGCUGCA |
| 731 | 14131 | 24131 | CUUCAGGGUCAUCUGCUGCAGAUGACCCUGAAG |
| 732 | 14132 | 24132 | CCGACAAGGUGCCUUGGCCAGGCACCUUGUCGG |
| 733 | 14133 | 24133 | UUCUGCCGGUAAUUGUAGAAAUUACCGGCAGAA |
| 734 | 14134 | 24134 | CAGACUCGGUGUCCGGGACGGACACCGAGUCUG |
| 735 | 14135 | 24135 | GGCCAUGUCUUUCUCGUUGAGAAAGACAUGGCC |
| 736 | 14136 | 24136 | UGGAACACCAUGAAGGUGGUUCAUGGUGUUCCA |
| 737 | 14137 | 24137 | UAGGCGUAGACCUUGACUGAAGGUCUACGCCUA |
| 738 | 14138 | 24138 | GUUACUCCUGGCCAGGCCCUGGCCAGGAGUAAC |
| 739 | 14139 | 24139 | GUAGGAUCUCUGUAGGUUCUACAGAGAUCCUAC |
| 740 | 14140 | 24140 | UGCAGGUAAUUGUUGGAGUAACAAUUACCUGCA |
| 741 | 14141 | 24141 | UGUGAAACCCUCAUUUUCCAUGAGGGUUUCACA |
| 742 | 14142 | 24142 | UGUAGUUGGCUUCAAGGAAUGAAGCCAACUACA |
| 743 | 14143 | 24143 | AGAGUAGGGUAGCCGCAGGGGCUACCCUACUCU |
| 744 | 14144 | 24144 | AUCAUAGUGUUCUUGGCAUAAGAACACUAUGAU |
| 745 | 14145 | 24145 | GGAGGCUGGCAGAUUCCCAAUCUGCCAGCCUCC |
| 746 | 14146 | 24146 | CUCAAGGAUCAUAGUGUUCCUAUGAUCCUUGAG |
| 747 | 14147 | 24147 | AUGGCCAUGAUGUACUCGUUACAUCAUGGCCAU |
| 748 | 14148 | 24148 | GCAGAGCUUGUUCAGCUUUUGAACAAGCUCUGC |
| 749 | 14149 | 24149 | UGCACCAUGUCACUGCCUGAGUGACAUGGUGCA |
| 750 | 14150 | 24150 | CAGUCAUCAUGGAUAUGUCAUCCAUGAUGACUG |

[0388] Tables 3a to c below show 100 antisense sequences, sense sequences and hairpins of the disclosure, respectively; with full modification information (modified sugars and, where applicable, modified phosphates).

TABLE 3a
Modified antisense constructs of the disclosure

| SEQ ID | Antisense | |
|---|---|---|
| NO | ID | Modified 19mer Antisense |
| 751 | 23901 | [5Phos][mU][Ps][fA][Ps][mG][fG][mC][fU][mC][fG][mG][fA][mU][fC][mU][fU][Ps][mC][Ps][fC][Ps][mA][Ps][fC][Ps][mU] |
| 752 | 23902 | [5Phos][mU][Ps][fG][Ps][mA][fG][mA][fG][mA][fA][mG][fA][mC][fC][mU][fU][Ps][mG][Ps][fA][Ps][mC][Ps][fC][Ps][mA] |
| 753 | 23903 | [5Phos][mU][Ps][fC][Ps][mA][fC][mA][fC][mA][fG][mA][fU][mC][fC][mC][fU][Ps][mU][Ps][fU][Ps][mC][Ps][fU][Ps][mU] |
| 754 | 23904 | [5Phos][mU][Ps][fU][Ps][mG][fU][mA][fG][mA][fU][mG][fG][mU][fC][mU][fU][Ps][mG][Ps][fU][Ps][mC][Ps][fU][Ps][mG] |
| 755 | 23905 | [5Phos][mU][Ps][fA][Ps][mG][fA][mG][fA][mG][fA][mA][fG][mA][fC][mC][fU][Ps][mU][Ps][fG][Ps][mA][Ps][fC][Ps][mC] |
| 756 | 23906 | [5Phos][mU][Ps][fA][Ps][mC][fA][mC][fA][mG][fA][mU][fC][mC][fC][mU][fU][Ps][mU][Ps][fC][Ps][mU][Ps][fU][Ps][mG] |
| 757 | 23907 | [5Phos][mU][Ps][fC][Ps][mG][fA][mA][fC][mA][fC][mC][fA][mU][fG][mA][fG][Ps][mG][Ps][fU][Ps][mC][Ps][fA][Ps][mA] |
| 758 | 23908 | [5Phos][mU][Ps][fA][Ps][mC][fC][mA][fU][mG][fA][mG][fG][mU][fC][mA][fA][Ps][mA][Ps][fG][Ps][mG][Ps][fG][Ps][mC] |
| 759 | 23909 | [5Phos][mU][Ps][fA][Ps][mG][fA][mC][fC][mU][fU][mG][fA][mC][fC][mA][fC][Ps][mG][Ps][fU][Ps][mA][Ps][fG][Ps][mG] |
| 760 | 23910 | [5Phos][mU][Ps][fC][Ps][mA][fC][mC][fA][mU][fG][mA][fG][mG][fU][mC][fA][Ps][mA][Ps][fA][Ps][mG][Ps][fG][Ps][mG] |
| 761 | 23911 | [5Phos][mU][Ps][fA][Ps][mA][fC][mA][fC][mC][fA][mU][fG][mA][fG][mG][fU][Ps][mC][Ps][fA][Ps][mA][Ps][fA][Ps][mG] |
| 762 | 23912 | [5Phos][mU][Ps][fA][Ps][mA][fG][mA][fC][mC][fU][mU][fG][mA][fC][mC][fA][Ps][mC][Ps][fG][Ps][mU][Ps][fA][Ps][mG] |
| 763 | 23913 | [5Phos][mU][Ps][fA][Ps][mG][fA][mA][fG][mA][fC][mC][fU][mU][fG][mA][fC][Ps][mC][Ps][fA][Ps][mC][Ps][fG][Ps][mU] |
| 764 | 23914 | [5Phos][mU][Ps][fG][Ps][mG][fU][mC][fU][mU][fG][mU][fA][mC][fA][mC][fA][Ps][mU][Ps][fA][Ps][mG][Ps][fU][Ps][mC] |
| 765 | 23915 | [5Phos][mU][Ps][fC][Ps][mC][fA][mU][fG][mA][fG][mG][fU][mC][fA][mA][fA][Ps][mG][Ps][fG][Ps][mG][Ps][fC][Ps][mA] |
| 766 | 23916 | [5Phos][mU][Ps][fC][Ps][mA][fU][mG][fA][mG][fG][mU][fC][mA][fA][mA][fG][Ps][mG][Ps][fG][Ps][mC][Ps][fA][Ps][mU] |
| 767 | 23917 | [5Phos][mU][Ps][fG][Ps][mG][fA][mG][fA][mA][fU][mU][fC][mU][fG][mG][fU][Ps][mC][Ps][fU][Ps][mC][Ps][fA][Ps][mG] |
| 768 | 23918 | [5Phos][mU][Ps][fG][Ps][mG][fU][mA][fU][mU][fG][mA][fG][mC][fC][mA][fA][Ps][mG][Ps][fG][Ps][mC][Ps][fU][Ps][mU] |
| 769 | 23919 | [5Phos][mU][Ps][fC][Ps][mA][fG][mC][fC][mA][fG][mA][fG][mA][fG][mA][fA][Ps][mG][Ps][fA][Ps][mC][Ps][fC][Ps][mU] |
| 770 | 23920 | [5Phos][mU][Ps][fG][Ps][mA][fA][mA][fC][mU][fG][mG][fG][mC][fA][mG][fC][Ps][mA][Ps][fC][Ps][mG][Ps][fU][Ps][mA] |
| 771 | 23921 | [5Phos][mU][Ps][fA][Ps][mU][fU][mU][fC][mU][fC][mU][fG][mU][fA][mG][fG][Ps][mC][Ps][fU][Ps][mC][Ps][fC][Ps][mA] |
| 772 | 23922 | [5Phos][mU][Ps][fU][Ps][mG][fC][mC][fU][mU][fG][mG][fC][mC][fU][mU][fU][Ps][mU][Ps][fC][Ps][mC][Ps][fU][Ps][mU] |
| 773 | 23923 | [5Phos][mU][Ps][fC][Ps][mA][fG][mA][fG][mA][fG][mA][fA][mG][fA][mC][fC][Ps][mU][Ps][fU][Ps][mG][Ps][fA][Ps][mC] |
| 774 | 23924 | [5Phos][mU][Ps][fA][Ps][mA][fU][mU][fU][mC][fU][mC][fU][mG][fU][mA][fG][Ps][mG][Ps][fC][Ps][mU][Ps][fC][Ps][mC] |
| 775 | 23925 | [5Phos][mU][Ps][fU][Ps][mU][fU][mC][fU][mC][fU][mG][fU][mA][fG][mG][fC][Ps][mU][Ps][fC][Ps][mC][Ps][fA][Ps][mC] |
| 776 | 23926 | [5Phos][mU][Ps][fG][Ps][mG][fG][mC][fC][mA][fG][mU][fG][mC][fU][mC][fC][Ps][mA][Ps][fC][Ps][mC][Ps][fC][Ps][mA] |
| 777 | 23927 | [5Phos][mU][Ps][fG][Ps][mA][fC][mA][fU][mA][fG][mU][fG][mG][fC][mA][fU][Ps][mC][Ps][fC][Ps][mU][Ps][fG][Ps][mG] |
| 778 | 23928 | [5Phos][mU][Ps][fC][Ps][mA][fU][mU][fC][mU][fG][mA][fU][mU][fC][mC][fU][Ps][mU][Ps][fC][Ps][mC][Ps][fG][Ps][mG] |
| 779 | 23929 | [5Phos][mU][Ps][fU][Ps][mU][fC][mA][fU][mU][fG][mA][fG][mC][fC][mA][fA][Ps][mC][Ps][fG][Ps][mC][Ps][fA][Ps][mC] |
| 780 | 23930 | [5Phos][mU][Ps][fC][Ps][mC][fA][mG][fG][mU][fA][mG][fA][mU][fG][mA][fU][Ps][mG][Ps][fA][Ps][mG][Ps][fG][Ps][mG] |
| 781 | 23931 | [5Phos][mU][Ps][fG][Ps][mC][fA][mA][fU][mU][fC][mU][fC][mC][fU][mC][fA][Ps][mG][Ps][fC][Ps][mA][Ps][fC][Ps][mA] |
| 782 | 23932 | [5Phos][mU][Ps][fU][Ps][mA][fG][mG][fC][mU][fC][mG][fG][mA][fU][mC][fU][Ps][mU][Ps][fC][Ps][mC][Ps][fA][Ps][mC] |
| 783 | 23933 | [5Phos][mU][Ps][fG][Ps][mC][fC][mA][fU][mG][fA][mU][fG][mU][fA][mC][fU][Ps][mC][Ps][fG][Ps][mU][Ps][fC][Ps][mA] |
| 784 | 23934 | [5Phos][mU][Ps][fA][Ps][mA][fA][mG][fU][mC][fA][mU][fU][mG][fG][mA][fC][Ps][mA][Ps][fG][Ps][mC][Ps][fU][Ps][mG] |
| 785 | 23935 | [5Phos][mU][Ps][fC][Ps][mA][fU][mA][fC][mU][fU][mG][fG][mA][fG][mA][fU][Ps][mG][Ps][fU][Ps][mA][Ps][fU][Ps][mC] |
| 786 | 23936 | [5Phos][mU][Ps][fU][Ps][mG][fG][mA][fG][mA][fU][mG][fU][mA][fU][mC][fU][Ps][mG][Ps][fU][Ps][mC][Ps][fA][Ps][mA] |
| 787 | 23937 | [5Phos][mU][Ps][fG][Ps][mU][fG][mA][fU][mG][fG][mA][fG][mU][fC][mU][fU][Ps][mU][Ps][fC][Ps][mA][Ps][fA][Ps][mA] |
| 788 | 23938 | [5Phos][mU][Ps][fC][Ps][mA][fC][mA][fG][mU][fG][mU][fA][mG][fG][mA][fU][Ps][mC][Ps][fU][Ps][mC][Ps][fU][Ps][mG] |
| 789 | 23939 | [5Phos][mU][Ps][fC][Ps][mU][fG][mU][fG][mA][fC][mU][fG][mU][fG][mA][fA][Ps][mA][Ps][fC][Ps][mC][Ps][fC][Ps][mU] |
| 790 | 23940 | [5Phos][mU][Ps][fC][Ps][mA][fG][mA][fA][mU][fC][mU][fC][mC][fC][mA][fC][Ps][mG][Ps][fU][Ps][mG][Ps][fG][Ps][mU] |
| 791 | 23941 | [5Phos][mU][Ps][fC][Ps][mU][fG][mC][fU][mU][fU][mA][fG][mU][fG][mA][fU][Ps][mG][Ps][fC][Ps][mU][Ps][fG][Ps][mC] |
| 792 | 23942 | [5Phos][mU][Ps][fU][Ps][mG][fA][mG][fG][mG][fU][mG][fU][mU][fC][mC][fU][Ps][mA][Ps][fU][Ps][mC][Ps][fG][Ps][mG] |
| 793 | 23943 | [5Phos][mU][Ps][fA][Ps][mG][fC][mA][fU][mG][fG][mU][fA][mC][fA][mU][fU][Ps][mG][Ps][fU][Ps][mC][Ps][fA][Ps][mC] |
| 794 | 23944 | [5Phos][mU][Ps][fG][Ps][mA][fG][mG][fG][mU][fG][mU][fU][mC][fC][mU][fA][Ps][mU][Ps][fC][Ps][mG][Ps][fG][Ps][mA] |
| 795 | 23945 | [5Phos][mU][Ps][fG][Ps][mU][fA][mG][fA][mA][fU][mU][fU][mC][fU][mC][fU][Ps][mG][Ps][fU][Ps][mA][Ps][fG][Ps][mG] |
| 796 | 23946 | [5Phos][mU][Ps][fG][Ps][mG][fU][mG][fA][mA][fC][mU][fU][mU][fG][mA][fA][Ps][mA][Ps][fG][Ps][mC][Ps][fU][Ps][mA] |
| 797 | 23947 | [5Phos][mU][Ps][fC][Ps][mC][fA][mU][fG][mU][fU][mG][fA][mC][fG][mA][fG][Ps][mU][Ps][fU][Ps][mC][Ps][fC][Ps][mG] |
| 798 | 23948 | [5Phos][mU][Ps][fG][Ps][mA][fU][mG][fC][mA][fG][mG][fU][mA][fA][mU][fU][Ps][mG][Ps][fU][Ps][mU][Ps][fG][Ps][mG] |
| 799 | 23949 | [5Phos][mU][Ps][fG][Ps][mU][fA][mC][fC][mU][fG][mG][fU][mA][fC][mA][fG][Ps][mA][Ps][fU][Ps][mC][Ps][fU][Ps][mC] |
| 800 | 23950 | [5Phos][mU][Ps][fU][Ps][mA][fA][mU][fU][mG][fU][mU][fG][mG][fA][mG][fU][Ps][mU][Ps][fG][Ps][mC][Ps][fC][Ps][mC] |
| 801 | 23951 | [5Phos][mU][Ps][fA][Ps][mA][fU][mU][fG][mU][fU][mG][fG][mA][fG][mU][fU][Ps][mG][Ps][fC][Ps][mC][Ps][fC][Ps][mA] |
| 802 | 23952 | [5Phos][mU][Ps][fC][Ps][mG][fC][mC][fA][mU][fC][mC][fU][mG][fG][mA][fU][Ps][mC][Ps][fC][Ps][mC][Ps][fG][Ps][mA] |
| 803 | 23953 | [5Phos][mU][Ps][fG][Ps][mA][fA][mU][fU][mU][fC][mU][fC][mU][fG][mU][fA][Ps][mG][Ps][fG][Ps][mC][Ps][fU][Ps][mC] |
| 804 | 23954 | [5Phos][mU][Ps][fC][Ps][mA][fA][mA][fG][mU][fC][mU][fU][mU][fU][mA][fG][Ps][mC][Ps][fU][Ps][mG][Ps][fC][Ps][mA] |
| 805 | 23955 | [5Phos][mU][Ps][fC][Ps][mG][fA][mG][fU][mU][fC][mC][fG][mG][fA][mA][fU][Ps][mG][Ps][fU][Ps][mC][Ps][fC][Ps][mC] |
| 806 | 23956 | [5Phos][mU][Ps][fA][Ps][mA][fG][mC][fA][mA][fU][mU][fC][mU][fC][mC][fU][Ps][mC][Ps][fA][Ps][mG][Ps][fC][Ps][mA] |
| 807 | 23957 | [5Phos][mU][Ps][fA][Ps][mA][fC][mG][fA][mU][fG][mU][fU][mC][fU][mC][fU][Ps][mU][Ps][fC][Ps][mU][Ps][fG][Ps][mC] |
| 808 | 23958 | [5Phos][mU][Ps][fG][Ps][mG][fA][mU][fC][mC][fC][mG][fA][mA][fG][mA][fU][Ps][mG][Ps][fA][Ps][mC][Ps][fA][Ps][mA] |
| 809 | 23959 | [5Phos][mU][Ps][fA][Ps][mG][fA][mG][fC][mU][fU][mG][fU][mU][fC][mA][fG][Ps][mC][Ps][fU][Ps][mU][Ps][fU][Ps][mC] |
| 810 | 23960 | [5Phos][mU][Ps][fU][Ps][mA][fG][mA][fC][mA][fU][mA][fG][mU][fG][mG][fC][Ps][mA][Ps][fU][Ps][mC][Ps][fC][Ps][mU] |
| 811 | 23961 | [5Phos][mU][Ps][fG][Ps][mG][fU][mA][fA][mU][fU][mG][fU][mU][fG][mG][fA][Ps][mG][Ps][fU][Ps][mU][Ps][fG][Ps][mC] |
| 812 | 23962 | [5Phos][mU][Ps][fC][Ps][mU][fG][mA][fU][mU][fC][mC][fU][mU][fC][mC][fG][Ps][mG][Ps][fC][Ps][mA][Ps][fC][Ps][mG] |
| 813 | 23963 | [5Phos][mU][Ps][fG][Ps][mA][fA][mA][fC][mC][fC][mU][fC][mA][fU][mU][fU][Ps][mU][Ps][fC][Ps][mC][Ps][fU][Ps][mU] |
| 814 | 23964 | [5Phos][mU][Ps][fA][Ps][mU][fC][mA][fU][mA][fG][mU][fG][mU][fU][mC][fU][Ps][mU][Ps][fG][Ps][mG][Ps][fC][Ps][mA] |
| 815 | 23965 | [5Phos][mU][Ps][fG][Ps][mU][fG][mC][fU][mG][fG][mU][fU][mU][fU][mA][fU][Ps][mG][Ps][fG][Ps][mU][Ps][fG][Ps][mA] |
| 816 | 23966 | [5Phos][mU][Ps][fA][Ps][mA][fA][mG][fG][mG][fC][mA][fU][mU][fC][mC][fU][Ps][mG][Ps][fG][Ps][mU][Ps][fU][Ps][mU] |
| 817 | 23967 | [5Phos][mU][Ps][fC][Ps][mC][fA][mG][fG][mU][fU][mA][fC][mU][fC][mC][fU][Ps][mG][Ps][fG][Ps][mC][Ps][fC][Ps][mA] |
| 818 | 23968 | [5Phos][mU][Ps][fA][Ps][mA][fG][mU][fC][mU][fU][mU][fU][mA][fG][mC][fU][Ps][mG][Ps][fC][Ps][mA][Ps][fG][Ps][mU] |
| 819 | 23969 | [5Phos][mU][Ps][fU][Ps][mG][fG][mG][fU][mU][fG][mU][fC][mU][fG][mA][fA][Ps][mG][Ps][fG][Ps][mC][Ps][fC][Ps][mA] |
| 820 | 23970 | [5Phos][mU][Ps][fC][Ps][mC][fA][mG][fC][mU][fC][mA][fU][mA][fC][mU][fU][Ps][mG][Ps][fG][Ps][mA][Ps][fG][Ps][mA] |
| 821 | 23971 | [5Phos][mU][Ps][fG][Ps][mA][fA][mG][fU][mC][fC][mU][fG][mC][fA][mU][fU][Ps][mA][Ps][fC][Ps][mU][Ps][fG][Ps][mU] |
| 822 | 23972 | [5Phos][mU][Ps][fC][Ps][mA][fG][mA][fU][mC][fU][mU][fA][mC][fU][mC][fU][Ps][mG][Ps][fC][Ps][mG][Ps][fU][Ps][mC] |
| 823 | 23973 | [5Phos][mU][Ps][fG][Ps][mG][fG][mC][fU][mU][fC][mU][fG][mC][fU][mU][fC][Ps][mU][Ps][fC][Ps][mC][Ps][fA][Ps][mG] |
| 824 | 23974 | [5Phos][mU][Ps][fC][Ps][mU][fG][mG][fU][mU][fU][mU][fA][mU][fG][mG][fU][Ps][mG][Ps][fA][Ps][mC][Ps][fC][Ps][mU] |
| 825 | 23975 | [5Phos][mU][Ps][fG][Ps][mG][fC][mA][fC][mC][fC][mA][fA][mA][fG][mA][fC][Ps][mA][Ps][fA][Ps][mC][Ps][fC][Ps][mA] |
| 826 | 23976 | [5Phos][mU][Ps][fA][Ps][mG][fC][mU][fC][mU][fU][mG][fG][mU][fU][mC][fU][Ps][mG][Ps][fC][Ps][mC][Ps][fG][Ps][mG] |
| 827 | 23977 | [5Phos][mU][Ps][fG][Ps][mG][fA][mA][fG][mU][fU][mG][fA][mC][fG][mU][fU][Ps][mG][Ps][fA][Ps][mG][Ps][fG][Ps][mG] |
| 828 | 23978 | [5Phos][mU][Ps][fG][Ps][mC][fA][mG][fA][mG][fC][mU][fG][mG][fG][mU][fU][Ps][mG][Ps][fU][Ps][mC][Ps][fU][Ps][mG] |
| 829 | 23979 | [5Phos][mU][Ps][fA][Ps][mU][fA][mG][fU][mC][fC][mA][fC][mU][fC][mC][fU][Ps][mG][Ps][fG][Ps][mC][Ps][fU][Ps][mC] |
| 830 | 23980 | [5Phos][mU][Ps][fU][Ps][mC][fG][mA][fA][mU][fU][mU][fA][mU][fU][mA][fC][Ps][mA][Ps][fG][Ps][mG][Ps][fU][Ps][mG] |
| 831 | 23981 | [5Phos][mU][Ps][fA][Ps][mG][fA][mA][fU][mU][fU][mC][fU][mC][fU][mG][fU][Ps][mA][Ps][fG][Ps][mG][Ps][fC][Ps][mU] |
| 832 | 23982 | [5Phos][mU][Ps][fA][Ps][mG][fU][mG][fU][mU][fC][mU][fU][mG][fG][mC][fA][Ps][mU][Ps][fC][Ps][mC][Ps][fU][Ps][mG] |
| 833 | 23983 | [5Phos][mU][Ps][fG][Ps][mA][fA][mA][fC][mG][fA][mU][fG][mU][fU][mC][fU][Ps][mC][Ps][fU][Ps][mU][Ps][fC][Ps][mU] |
| 834 | 23984 | [5Phos][mU][Ps][fA][Ps][mG][fU][mA][fG][mG][fC][mU][fC][mG][fG][mA][fU][Ps][mC][Ps][fU][Ps][mU][Ps][fC][Ps][mC] |
| 835 | 23985 | [5Phos][mU][Ps][fU][Ps][mC][fU][mC][fC][mU][fC][mA][fG][mC][fA][mC][fA][Ps][mG][Ps][fC][Ps][mG][Ps][fG][Ps][mC] |
| 836 | 23986 | [5Phos][mU][Ps][fU][Ps][mG][fC][mG][fC][mA][fC][mC][fG][mU][fG][mA][fU][Ps][mG][Ps][fC][Ps][mU][Ps][fC][Ps][mA] |
| 837 | 23987 | [5Phos][mU][Ps][fU][Ps][mG][fU][mA][fC][mU][fC][mG][fU][mC][fA][mA][fA][Ps][mG][Ps][fU][Ps][mC][Ps][fA][Ps][mU] |
| 838 | 23988 | [5Phos][mU][Ps][fC][Ps][mC][fG][mU][fG][mA][fG][mG][fG][mC][fC][mA][fU][Ps][mG][Ps][fU][Ps][mC][Ps][fU][Ps][mU] |
| 839 | 23989 | [5Phos][mU][Ps][fG][Ps][mG][fU][mU][fC][mU][fC][mA][fA][mU][fG][mU][fU][Ps][mG][Ps][fA][Ps][mC][Ps][fC][Ps][mA] |
| 840 | 23990 | [5Phos][mU][Ps][fC][Ps][mU][fG][mA][fC][mA][fC][mC][fG][mU][fC][mA][fC][Ps][mU][Ps][fG][Ps][mA][Ps][fU][Ps][mG] |
| 841 | 23991 | [5Phos][mU][Ps][fA][Ps][mU][fG][mA][fC][mC][fU][mC][fG][mA][fA][mA][fC][Ps][mU][Ps][fG][Ps][mG][Ps][fG][Ps][mC] |
| 842 | 23992 | [5Phos][mU][Ps][fU][Ps][mG][fA][mG][fG][mU][fC][mG][fA][mA][fU][mU][fU][Ps][mA][Ps][fU][Ps][mU][Ps][fA][Ps][mC] |
| 843 | 23993 | [5Phos][mU][Ps][fC][Ps][mU][fC][mA][fU][mU][fU][mU][fC][mC][fU][mU][fG][Ps][mG][Ps][fU][Ps][mC][Ps][fU][Ps][mC] |
| 844 | 23994 | [5Phos][mU][Ps][fA][Ps][mC][fU][mU][fU][mU][fG][mU][fA][mU][fG][mA][fA][Ps][mG][Ps][fC][Ps][mA][Ps][fA][Ps][mU] |
| 845 | 23995 | [5Phos][mU][Ps][fG][Ps][mA][fG][mU][fG][mU][fG][mA][fG][mA][fC][mC][fU][Ps][mU][Ps][fG][Ps][mU][Ps][fC][Ps][mC] |
| 846 | 23996 | [5Phos][mU][Ps][fC][Ps][mG][fA][mA][fU][mU][fU][mA][fU][mU][fA][mC][fA][Ps][mG][Ps][fG][Ps][mU][Ps][fG][Ps][mA] |
| 847 | 23997 | [5Phos][mU][Ps][fC][Ps][mA][fA][mC][fC][mU][fG][mC][fA][mC][fC][mU][fC][Ps][mA][Ps][fU][Ps][mC][Ps][fC][Ps][mG] |
| 848 | 23998 | [5Phos][mU][Ps][fC][Ps][mA][fG][mA][fG][mU][fG][mU][fG][mA][fG][mA][fC][Ps][mC][Ps][fU][Ps][mU][Ps][fG][Ps][mU] |
| 849 | 23999 | [5Phos][mU][Ps][fA][Ps][mU][fC][mU][fC][mU][fG][mU][fU][mC][fA][mU][fU][Ps][mG][Ps][fA][Ps][mG][Ps][fC][Ps][mC] |
| 850 | 24000 | [5Phos][mU][Ps][fA][Ps][mG][fA][mA][fG][mU][fC][mC][fU][mG][fC][mA][fU][Ps][mU][Ps][fA][Ps][mC][Ps][fU][Ps][mG] |

Note =
Each of the above constructs may or may not have a phosphate modification at the 5′ end group. Furthermore, and independently, each of the above constructs may or may not have a “3x GalNAc” coupled to the 3′ end group. Optional are constructs with a 3x GalNAc ligand. Particularly optional are constructs which in addition have a 5′ phosphate, even though this is not a strict requirement, given that in the absence thereof, mammalian cells will add such phosphate in case it is absent from the molecule as administered.

TABLE 3b
Modified sense constructs of the present disclosure

| SEQ ID | Sense | |
|---|---|---|
| NO | ID | Modified 15mer Sense |
| 851 | 13901 | [fG][Ps][mA][Ps][fA][mG][fA][mU][fC][mC][fG][mA][fG][mC][fC][Ps][mU][Ps][fA][3xGalNac] |
| 852 | 13902 | [fC][Ps][mA][Ps][fA][mG][fG][mU][fC][mU][fU][mC][fU][mC][fU][Ps][mC][Ps][fA][3xGalNac] |
| 853 | 13903 | [fA][Ps][mA][Ps][fG][mG][fG][mA][fU][mC][fU][mG][fU][mG][fU][Ps][mG][Ps][fA][3xGalNac] |
| 854 | 13904 | [fC][Ps][mA][Ps][fA][mG][fA][mC][fC][mA][fU][mC][fU][mA][fC][Ps][mA][Ps][fA][3xGalNac] |
| 855 | 13905 | [fA][Ps][mA][Ps][fG][mG][fU][mC][fU][mU][fC][mU][fC][mU][fC][Ps][mU][Ps][fA][3xGalNac] |
| 856 | 13906 | [fA][Ps][mA][Ps][fA][mG][fG][mG][fA][mU][fC][mU][fG][mU][fG][Ps][mU][Ps][fA][3xGalNac] |
| 857 | 13907 | [fC][Ps][mC][Ps][fU][mC][fA][mU][fG][mG][fU][mG][fU][mU][fC][Ps][mG][Ps][fA][3xGalNac] |
| 858 | 13908 | [fU][Ps][mU][Ps][fU][mG][fA][mC][fC][mU][fC][mA][fU][mG][fG][Ps][mU][Ps][fA][3xGalNac] |
| 859 | 13909 | [fC][Ps][mG][Ps][fU][mG][fG][mU][fC][mA][fA][mG][fG][mU][fC][Ps][mU][Ps][fA][3xGalNac] |
| 860 | 13910 | [fU][Ps][mU][Ps][fG][mA][fC][mC][fU][mC][fA][mU][fG][mG][fU][Ps][mG][Ps][fA][3xGalNac] |
| 861 | 13911 | [fG][Ps][mA][Ps][fC][mC][fU][mC][fA][mU][fG][mG][fU][mG][fU][Ps][mU][Ps][fA][3xGalNac] |
| 862 | 13912 | [fG][Ps][mU][Ps][fG][mG][fU][mC][fA][mA][fG][mG][fU][mC][fU][Ps][mU][Ps][fA][3xGalNac] |
| 863 | 13913 | [fG][Ps][mG][Ps][fU][mC][fA][mA][fG][mG][fU][mC][fU][mU][fC][Ps][mU][Ps][fA][3xGalNac] |
| 864 | 13914 | [fA][Ps][mU][Ps][fG][mU][fG][mU][fA][mC][fA][mA][fG][mA][fC][Ps][mC][Ps][fA][3xGalNac] |
| 865 | 13915 | [fC][Ps][mU][Ps][fU][mU][fG][mA][fC][mC][fU][mC][fA][mU][fG][Ps][mG][Ps][fA][3xGalNac] |
| 866 | 13916 | [fC][Ps][mC][Ps][fU][mU][fU][mG][fA][mC][fC][mU][fC][mA][fU][Ps][mG][Ps][fA][3xGalNac] |
| 867 | 13917 | [fG][Ps][mA][Ps][fC][mC][fA][mG][fA][mA][fU][mU][fC][mU][fC][Ps][mC][Ps][fA][3xGalNac] |
| 868 | 13918 | [fC][Ps][mU][Ps][fU][mG][fG][mC][fU][mC][fA][mA][fU][mA][fC][Ps][mC][Ps][fA][3xGalNac] |
| 869 | 13919 | [fC][Ps][mU][Ps][fU][mC][fU][mC][fU][mC][fU][mG][fG][mC][fU][Ps][mG][Ps][fA][3xGalNac] |
| 870 | 13920 | [fU][Ps][mG][Ps][fC][mU][fG][mC][fC][mC][fA][mG][fU][mU][fU][Ps][mC][Ps][fA][3xGalNac] |
| 871 | 13921 | [fG][Ps][mC][Ps][fC][mU][fA][mC][fA][mG][fA][mG][fA][mA][fA][Ps][mU][Ps][fA][3xGalNac] |
| 872 | 13922 | [fA][Ps][mA][Ps][fA][mA][fG][mG][fC][mC][fA][mA][fG][mG][fC][Ps][mA][Ps][fA][3xGalNac] |
| 873 | 13923 | [fA][Ps][mG][Ps][fG][mU][fC][mU][fU][mC][fU][mC][fU][mC][fU][Ps][mG][Ps][fA][3xGalNac] |
| 874 | 13924 | [fC][Ps][mC][Ps][fU][mA][fC][mA][fG][mA][fG][mA][fA][mA][fU][Ps][mU][Ps][fA][3xGalNac] |
| 875 | 13925 | [fA][Ps][mG][Ps][fC][mC][fU][mA][fC][mA][fG][mA][fG][mA][fA][Ps][mA][Ps][fA][3xGalNac] |
| 876 | 13926 | [fU][Ps][mG][Ps][fG][mA][fG][mC][fA][mC][fU][mG][fG][mC][fC][Ps][mC][Ps][fA][3xGalNac] |
| 877 | 13927 | [fG][Ps][mA][Ps][fU][mG][fC][mC][fA][mC][fU][mA][fU][mG][fU][Ps][mC][Ps][fA][3xGalNac] |
| 878 | 13928 | [fA][Ps][mA][Ps][fG][mG][fA][mA][fU][mC][fA][mG][fA][mA][fU][Ps][mG][Ps][fA][3xGalNac] |
| 879 | 13929 | [fG][Ps][mU][Ps][fU][mG][fG][mC][fU][mC][fA][mA][fU][mG][fA][Ps][mA][Ps][fA][3xGalNac] |
| 880 | 13930 | [fC][Ps][mA][Ps][fU][mC][fA][mU][fC][mU][fA][mC][fC][mU][fG][Ps][mG][Ps][fA][3xGalNac] |
| 881 | 13931 | [fC][Ps][mU][Ps][fG][mA][fG][mG][fA][mG][fA][mA][fU][mU][fG][Ps][mC][Ps][fA][3xGalNac] |
| 882 | 13932 | [fA][Ps][mA][Ps][fG][mA][fU][mC][fC][mG][fA][mG][fC][mC][fU][Ps][mA][Ps][fA][3xGalNac] |
| 883 | 13933 | [fG][Ps][mA][Ps][fG][mU][fA][mC][fA][mU][fC][mA][fU][mG][fG][Ps][mC][Ps][fA][3xGalNac] |
| 884 | 13934 | [fU][Ps][mG][Ps][fU][mC][fC][mA][fA][mU][fG][mA][fC][mU][fU][Ps][mU][Ps][fA][3xGalNac] |
| 885 | 13935 | [fC][Ps][mA][Ps][fU][mC][fU][mC][fC][mA][fA][mG][fU][mA][fU][Ps][mG][Ps][fA][3xGalNac] |
| 886 | 13936 | [fC][Ps][mA][Ps][fG][mA][fU][mA][fC][mA][fU][mC][fU][mC][fC][Ps][mA][Ps][fA][3xGalNac] |
| 887 | 13937 | [fA][Ps][mA][Ps][fA][mG][fA][mC][fU][mC][fC][mA][fU][mC][fA][Ps][mC][Ps][fA][3xGalNac] |
| 888 | 13938 | [fG][Ps][mA][Ps][fU][mC][fC][mU][fA][mC][fA][mC][fU][mG][fU][Ps][mG][Ps][fA][3xGalNac] |
| 889 | 13939 | [fU][Ps][mU][Ps][fU][mC][fA][mC][fA][mG][fU][mC][fA][mC][fA][Ps][mG][Ps][fA][3xGalNac] |
| 890 | 13940 | [fC][Ps][mG][Ps][fU][mG][fG][mG][fA][mG][fA][mU][fU][mC][fU][Ps][mG][Ps][fA][3xGalNac] |
| 891 | 13941 | [fC][Ps][mA][Ps][fU][mC][fA][mC][fU][mA][fA][mA][fG][mC][fA][Ps][mG][Ps][fA][3xGalNac] |
| 892 | 13942 | [fU][Ps][mA][Ps][fG][mG][fA][mA][fC][mA][fC][mC][fC][mU][fC][Ps][mA][Ps][fA][3xGalNac] |
| 893 | 13943 | [fC][Ps][mA][Ps][fA][mU][fG][mU][fA][mC][fC][mA][fU][mG][fC][Ps][mU][Ps][fA][3xGalNac] |
| 894 | 13944 | [fA][Ps][mU][Ps][fA][mG][fG][mA][fA][mC][fA][mC][fC][mC][fU][Ps][mC][Ps][fA][3xGalNac] |
| 895 | 13945 | [fC][Ps][mA][Ps][fG][mA][fG][mA][fA][mA][fU][mU][fC][mU][fA][Ps][mC][Ps][fA][3xGalNac] |
| 896 | 13946 | [fU][Ps][mU][Ps][fU][mC][fA][mA][fA][mG][fU][mU][fC][mA][fC][Ps][mC][Ps][fA][3xGalNac] |
| 897 | 13947 | [fA][Ps][mC][Ps][fU][mC][fG][mU][fC][mA][fA][mC][fA][mU][fG][Ps][mG][Ps][fA][3xGalNac] |
| 898 | 13948 | [fC][Ps][mA][Ps][fA][mU][fU][mA][fC][mC][fU][mG][fC][mA][fU][Ps][mC][Ps][fA][3xGalNac] |
| 899 | 13949 | [fU][Ps][mC][Ps][fU][mG][fU][mA][fC][mC][fA][mG][fG][mU][fA][Ps][mC][Ps][fA][3xGalNac] |
| 900 | 13950 | [fA][Ps][mA][Ps][fC][mU][fC][mC][fA][mA][fC][mA][fA][mU][fU][Ps][mA][Ps][fA][3xGalNac] |
| 901 | 13951 | [fC][Ps][mA][Ps][fA][mC][fU][mC][fC][mA][fA][mC][fA][mA][fU][Ps][mU][Ps][fA][3xGalNac] |
| 902 | 13952 | [fG][Ps][mA][Ps][fU][mC][fC][mA][fG][mG][fA][mU][fG][mG][fC][Ps][mG][Ps][fA][3xGalNac] |
| 903 | 13953 | [fC][Ps][mU][Ps][fA][mC][fA][mG][fA][mG][fA][mA][fA][mU][fU][Ps][mC][Ps][fA][3xGalNac] |
| 904 | 13954 | [fG][Ps][mC][Ps][fU][mA][fA][mA][fA][mG][fA][mC][fU][mU][fU][Ps][mG][Ps][fA][3xGalNac] |
| 905 | 13955 | [fC][Ps][mA][Ps][fU][mU][fC][mC][fG][mG][fA][mA][fC][mU][fC][Ps][mG][Ps][fA][3xGalNac] |
| 906 | 13956 | [fG][Ps][mA][Ps][fG][mG][fA][mG][fA][mA][fU][mU][fG][mC][fU][Ps][mU][Ps][fA][3xGalNac] |
| 907 | 13957 | [fA][Ps][mA][Ps][fG][mA][fG][mA][fA][mC][fA][mU][fC][mG][fU][Ps][mU][Ps][fA][3xGalNac] |
| 908 | 13958 | [fC][Ps][mA][Ps][fU][mC][fU][mU][fC][mG][fG][mG][fA][mU][fC][Ps][mC][Ps][fA][3xGalNac] |
| 909 | 13959 | [fG][Ps][mC][Ps][fU][mG][fA][mA][fC][mA][fA][mG][fC][mU][fC][Ps][mU][Ps][fA][3xGalNac] |
| 910 | 13960 | [fU][Ps][mG][Ps][fC][mC][fA][mC][fU][mA][fU][mG][fU][mC][fU][Ps][mA][Ps][fA][3xGalNac] |
| 911 | 13961 | [fC][Ps][mU][Ps][fC][mC][fA][mA][fC][mA][fA][mU][fU][mA][fC][Ps][mC][Ps][fA][3xGalNac] |
| 912 | 13962 | [fC][Ps][mC][Ps][fG][mG][fA][mA][fG][mG][fA][mA][fU][mC][fA][Ps][mG][Ps][fA][3xGalNac] |
| 913 | 13963 | [fA][Ps][mA][Ps][fA][mA][fU][mG][fA][mG][fG][mG][fU][mU][fU][Ps][mC][Ps][fA][3xGalNac] |
| 914 | 13964 | [fA][Ps][mA][Ps][fG][mA][fA][mC][fA][mC][fU][mA][fU][mG][fA][Ps][mU][Ps][fA][3xGalNac] |
| 915 | 13965 | [fC][Ps][mA][Ps][fU][mA][fA][mA][fA][mC][fC][mA][fG][mC][fA][Ps][mC][Ps][fA][3xGalNac] |
| 916 | 13966 | [fC][Ps][mA][Ps][fG][mG][fA][mA][fU][mG][fC][mC][fC][mU][fU][Ps][mU][Ps][fA][3xGalNac] |
| 917 | 13967 | [fC][Ps][mA][Ps][fG][mG][fA][mG][fU][mA][fA][mC][fC][mU][fG][Ps][mG][Ps][fA][3xGalNac] |
| 918 | 13968 | [fC][Ps][mA][Ps][fG][mC][fU][mA][fA][mA][fA][mG][fA][mC][fU][Ps][mU][Ps][fA][3xGalNac] |
| 919 | 13969 | [fC][Ps][mU][Ps][fU][mC][fA][mG][fA][mC][fA][mA][fC][mC][fC][Ps][mA][Ps][fA][3xGalNac] |
| 920 | 13970 | [fC][Ps][mA][Ps][fA][mG][fU][mA][fU][mG][fA][mG][fC][mU][fG][Ps][mG][Ps][fA][3xGalNac] |
| 921 | 13971 | [fU][Ps][mA][Ps][fA][mU][fG][mC][fA][mG][fG][mA][fC][mU][fU][Ps][mC][Ps][fA][3xGalNac] |
| 922 | 13972 | [fC][Ps][mA][Ps][fG][mA][fG][mU][fA][mA][fG][mA][fU][mC][fU][Ps][mG][Ps][fA][3xGalNac] |
| 923 | 13973 | [fA][Ps][mG][Ps][fA][mA][fG][mC][fA][mG][fA][mA][fG][mC][fC][Ps][mC][Ps][fA][3xGalNac] |
| 924 | 13974 | [fC][Ps][mA][Ps][fC][mC][fA][mU][fA][mA][fA][mA][fC][mC][fA][Ps][mG][Ps][fA][3xGalNac] |
| 925 | 13975 | [fU][Ps][mG][Ps][fU][mC][fU][mU][fU][mG][fG][mG][fU][mG][fC][Ps][mC][Ps][fA][3xGalNac] |
| 926 | 13976 | [fC][Ps][mA][Ps][fG][mA][fA][mC][fC][mA][fA][mG][fA][mG][fC][Ps][mU][Ps][fA][3xGalNac] |
| 927 | 13977 | [fC][Ps][mA][Ps][fA][mC][fG][mU][fC][mA][fA][mC][fU][mU][fC][Ps][mC][Ps][fA][3xGalNac] |
| 928 | 13978 | [fC][Ps][mA][Ps][fA][mC][fC][mC][fA][mG][fC][mU][fC][mU][fG][Ps][mC][Ps][fA][3xGalNac] |
| 929 | 13979 | [fC][Ps][mA][Ps][fG][mG][fA][mG][fU][mG][fG][mA][fC][mU][fA][Ps][mU][Ps][fA][3xGalNac] |
| 930 | 13980 | [fU][Ps][mG][Ps][fU][mA][fA][mU][fA][mA][fA][mU][fU][mC][fG][Ps][mA][Ps][fA][3xGalNac] |
| 931 | 13981 | [fU][Ps][mA][Ps][fC][mA][fG][mA][fG][mA][fA][mA][fU][mU][fC][Ps][mU][Ps][fA][3xGalNac] |
| 932 | 13982 | [fA][Ps][mU][Ps][fG][mC][fC][mA][fA][mG][fA][mA][fC][mA][fC][Ps][mU][Ps][fA][3xGalNac] |
| 933 | 13983 | [fG][Ps][mA][Ps][fG][mA][fA][mC][fA][mU][fC][mG][fU][mU][fU][Ps][mC][Ps][fA][3xGalNac] |
| 934 | 13984 | [fG][Ps][mA][Ps][fU][mC][fC][mG][fA][mG][fC][mC][fU][mA][fC][Ps][mU][Ps][fA][3xGalNac] |
| 935 | 13985 | [fC][Ps][mU][Ps][fG][mU][fG][mC][fU][mG][fA][mG][fG][mA][fG][Ps][mA][Ps][fA][3xGalNac] |
| 936 | 13986 | [fC][Ps][mA][Ps][fU][mC][fA][mC][fG][mG][fU][mG][fC][mG][fC][Ps][mA][Ps][fA][3xGalNac] |
| 937 | 13987 | [fC][Ps][mU][Ps][fU][mU][fG][mA][fC][mG][fA][mG][fU][mA][fC][Ps][mA][Ps][fA][3xGalNac] |
| 938 | 13988 | [fC][Ps][mA][Ps][fU][mG][fG][mC][fC][mC][fU][mC][fA][mC][fG][Ps][mG][Ps][fA][3xGalNac] |
| 939 | 13989 | [fC][Ps][mA][Ps][fA][mC][fA][mU][fU][mG][fA][mG][fA][mA][fC][Ps][mC][Ps][fA][3xGalNac] |
| 940 | 13990 | [fA][Ps][mG][Ps][fU][mG][fA][mC][fG][mG][fU][mG][fU][mC][fA][Ps][mG][Ps][fA][3xGalNac] |
| 941 | 13991 | [fA][Ps][mG][Ps][fU][mU][fU][mC][fG][mA][fG][mG][fU][mC][fA][Ps][mU][Ps][fA][3xGalNac] |
| 942 | 13992 | [fU][Ps][mA][Ps][fA][mA][fU][mU][fC][mG][fA][mC][fC][mU][fC][Ps][mA][Ps][fA][3xGalNac] |
| 943 | 13993 | [fC][Ps][mC][Ps][fA][mA][fG][mG][fA][mA][fA][mA][fU][mG][fA][Ps][mG][Ps][fA][3xGalNac] |
| 944 | 13994 | [fC][Ps][mU][Ps][fU][mC][fA][mU][fA][mC][fA][mA][fA][mA][fG][Ps][mU][Ps][fA][3xGalNac] |
| 945 | 13995 | [fA][Ps][mA][Ps][fG][mG][fU][mC][fU][mC][fA][mC][fA][mC][fU][Ps][mC][Ps][fA][3xGalNac] |
| 946 | 13996 | [fC][Ps][mU][Ps][fG][mU][fA][mA][fU][mA][fA][mA][fU][mU][fC][Ps][mG][Ps][fA][3xGalNac] |
| 947 | 13997 | [fU][Ps][mG][Ps][fA][mG][fG][mU][fG][mC][fA][mG][fG][mU][fU][Ps][mG][Ps][fA][3xGalNac] |
| 948 | 13998 | [fG][Ps][mG][Ps][fU][mC][fU][mC][fA][mC][fA][mC][fU][mC][fU][Ps][mG][Ps][fA][3xGalNac] |
| 949 | 13999 | [fC][Ps][mA][Ps][fA][mU][fG][mA][fA][mC][fA][mG][fA][mG][fA][Ps][mU][Ps][fA][3xGalNac] |
| 950 | 14000 | [fA][Ps][mA][Ps][fU][mG][fC][mA][fG][mG][fA][mC][fU][mU][fC][Ps][mU][Ps][fA][3xGalNac] |

Note =
each of the above constructs may or may not have a “3x GalNAc” coupled to the 3′ end group. Optional are constructs with a 3x GalNAc ligand, in particular a toothbrush ligand as defined herein.

TABLE 3c
Modified hairpin constructs of the present disclosure

| | Antisense | | |
|---|---|---|---|
| SEQ ID | ID + | Experimental | |
| NO | Sense ID | denotation | Modified 33mer Hairpin |
| 951 | 13901_{—} | C3-m-01 | [5Phos][mU][Ps][fA][Ps][mG][fG][mC][fU][mC][fG][mG][fA][mU][fC][mU][fU][Ps][mC][Ps][fC][Ps][mA][Ps] |
| | 23901 | | [fC][Ps][mU][Ps][mA][fA][mG][fA][mU][fC][mC][fG][mA][fG][mC][fC][Ps][mU][Ps][fA][Ps][3XGalNac] |
| 952 | 13902_{—} | C3-m-02 | [5Phos][mU][Ps][fG][Ps][mA][fG][mA][fG][mA][fA][mG][fA][mC][fC][mU][fU][Ps][mG][Ps][fA][Ps][mC][Ps] |
| | 23902 | | [fC][Ps][mA][Ps][mA][fA][mG][fG][mU][fC][mU][fU][mC][fU][mC][fU][Ps][mC][Ps][fA][Ps][3XGalNac] |
| 953 | 13903_{—} | C3-m-03 | [5Phos][mU][Ps][fC][Ps][mA][fC][mA][fC][mA][fG][mA][fU][mC][fC][mC][fU][Ps][mU][Ps][fU][Ps][mC][Ps] |
| | 23903 | | [fU][Ps][mU][Ps][mA][fG][mG][fG][mA][fU][mC][fU][mG][fU][mG][fU][Ps][mG][Ps][fA][Ps][3XGalNac] |
| 954 | 13904_{—} | C3-m-04 | [5Phos][mU][Ps][fU][Ps][mG][fU][mA][fG][mA][fU][mG][fG][mU][fC][mU][fU][Ps][mG][Ps][fU][Ps][mC][Ps] |
| | 23904 | | [fU][Ps][mG][Ps][mA][fA][mG][fA][mC][fC][mA][fU][mC][fU][mA][fC][Ps][mA][Ps][fA][Ps][3XGalNac] |
| 955 | 13905_{—} | C3-m-05 | [5Phos][mU][Ps][fA][Ps][mG][fA][mG][fA][mG][fA][mA][fG][mA][fC][mC][fU][Ps][mU][Ps][fG][Ps][mA][Ps] |
| | 23905 | | [fC][Ps][mC][Ps][mA][fG][mG][fU][mC][fU][mU][fC][mU][fC][mU][fC][Ps][mU][Ps][fA][Ps][3XGalNac] |
| 956 | 13906_{—} | C3-m-06 | [5Phos][mU][Ps][fA][Ps][mC][fA][mC][fA][mG][fA][mU][fC][mC][fC][mU][fU][Ps][mU][Ps][fC][Ps][mU][Ps] |
| | 23906 | | [fU][Ps][mG][Ps][mA][fA][mG][fG][mG][fA][mU][fC][mU][fG][mU][fG][Ps][mU][Ps][fA][Ps][3XGalNac] |
| 957 | 13907_{—} | C3-m-07 | [5Phos][mU][Ps][fC][Ps][mG][fA][mA][fC][mA][fC][mC][fA][mU][fG][mA][fG][Ps][mG][Ps][fU][Ps][mC][Ps] |
| | 23907 | | [fA][Ps][mA][Ps][mC][fU][mC][fA][mU][fG][mG][fU][mG][fU][mU][fC][Ps][mG][Ps][fA][Ps][3XGalNac] |
| 958 | 13908_{—} | C3-m-08 | [5Phos][mU][Ps][fA][Ps][mC][fC][mA][fU][mG][fA][mG][fG][mU][fC][mA][fA][Ps][mA][Ps][fG][Ps][mG][Ps] |
| | 23908 | | [fG][Ps][mC][Ps][mU][fU][mG][fA][mC][fC][mU][fC][mA][fU][mG][fG][Ps][mU][Ps][fA][Ps][3XGalNac] |
| 959 | 13909_{—} | C3-m-09 | [5Phos][mU][Ps][fA][Ps][mG][fA][mC][fC][mU][fU][mG][fA][mC][fC][mA][fC][Ps][mG][Ps][fU][Ps][mA][Ps] |
| | 23909 | | [fG][Ps][mG][Ps][mG][fU][mG][fG][mU][fC][mA][fA][mG][fG][mU][fC][Ps][mU][Ps][fA][Ps][3XGalNac] |
| 960 | 13910_{—} | C3-m-10 | [5Phos][mU][Ps][fC][Ps][mA][fC][mC][fA][mU][fG][mA][fG][mG][fU][mC][fA][Ps][mA][Ps][fA][Ps][mG][Ps] |
| | 23910 | | [fG][Ps][mG][Ps][mU][fG][mA][fC][mC][fU][mC][fA][mU][fG][mG][fU][Ps][mG][Ps][fA][Ps][3XGalNac] |
| 961 | 13911_{—} | C3-m-11 | [5Phos][mU][Ps][fA][Ps][mA][fC][mA][fC][mC][fA][mU][fG][mA][fG][mG][fU][Ps][mC][Ps][fA][Ps][mA][Ps] |
| | 23911 | | [fA][Ps][mG][Ps][mA][fC][mC][fU][mC][fA][mU][fG][mG][fU][mG][fU][Ps][mU][Ps][fA][Ps][3XGalNac] |
| 962 | 13912_{—} | C3-m-12 | [5Phos][mU][Ps][fA][Ps][mA][fG][mA][fC][mC][fU][mU][fG][mA][fC][mC][fA][Ps][mC][Ps][fG][Ps][mU][Ps] |
| | 23912 | | [fA][Ps][mG][Ps][mU][fG][mG][fU][mC][fA][mA][fG][mG][fU][mC][fU][Ps][mU][Ps][fA][Ps][3XGalNac] |
| 963 | 13913_{—} | C3-m-13 | [5Phos][mU][Ps][fA][Ps][mG][fA][mA][fG][mA][fC][mC][fU][mU][fG][mA][fC][Ps][mC][Ps][fA][Ps][mC][Ps] |
| | 23913 | | [fG][Ps][mU][Ps][mG][fU][mC][fA][mA][fG][mG][fU][mC][fU][mU][fC][Ps][mU][Ps][fA][Ps][3XGalNac] |
| 964 | 13914_{—} | C3-m-14 | [5Phos][mU][Ps][fG][Ps][mG][fU][mC][fU][mU][fG][mU][fA][mC][fA][mC][fA][Ps][mU][Ps][fA][Ps][mG][Ps] |
| | 23914 | | [fU][Ps][mC][Ps][mU][fG][mU][fG][mU][fA][mC][fA][mA][fG][mA][fC][Ps][mC][Ps][fA][Ps][3XGalNac] |
| 965 | 13915_{—} | C3-m-15 | [5Phos][mU][Ps][fC][Ps][mC][fA][mU][fG][mA][fG][mG][fU][mC][fA][mA][fA][Ps][mG][Ps][fG][Ps][mG][Ps] |
| | 23915 | | [fC][Ps][mA][Ps][mU][fU][mU][fG][mA][fC][mC][fU][mC][fA][mU][fG][Ps][mG][Ps][fA][Ps][3XGalNac] |
| 966 | 13916_{—} | C3-m-16 | [5Phos][mU][Ps][fC][Ps][mA][fU][mG][fA][mG][fG][mU][fC][mA][fA][mA][fG][Ps][mG][Ps][fG][Ps][mC][Ps] |
| | 23916 | | [fA][Ps][mU][Ps][mC][fU][mU][fU][mG][fA][mC][fC][mU][fC][mA][fU][Ps][mG][Ps][fA][Ps][3XGalNac] |
| 967 | 13917_{—} | C3-m-17 | [5Phos][mU][Ps][fG][Ps][mG][fA][mG][fA][mA][fU][mU][fC][mU][fG][mG][fU][Ps][mC][Ps][fU][Ps][mC][Ps] |
| | 23917 | | [fA][Ps][mG][Ps][mA][fC][mC][fA][mG][fA][mA][fU][mU][fC][mU][fC][Ps][mC][Ps][fA][Ps][3XGalNac] |
| 968 | 13918_{—} | C3-m-18 | [5Phos][mU][Ps][fG][Ps][mG][fU][mA][fU][mU][fG][mA][fG][mC][fC][mA][fA][Ps][mG][Ps][fG][Ps][mC][Ps] |
| | 23918 | | [fU][Ps][mU][Ps][mU][fU][mG][fG][mC][fU][mC][fA][mA][fU][mA][fC][Ps][mC][Ps][fA][Ps][3XGalNac] |
| 969 | 13919_{—} | C3-m-19 | [5Phos][mU][Ps][fC][Ps][mA][fG][mC][fC][mA][fG][mA][fG][mA][fG][mA][fA][Ps][mG][Ps][fA][Ps][mC][Ps] |
| | 23919 | | [fC][Ps][mU][Ps][mU][fU][mC][fU][mC][fU][mC][fU][mG][fG][mC][fU][Ps][mG][Ps][fA][Ps][3XGalNac] |
| 970 | 13920_{—} | C3-m-20 | [5Phos][mU][Ps][fG][Ps][mA][fA][mA][fC][mU][fG][mG][fG][mC][fA][mG][fC][Ps][mA][Ps][fC][Ps][mG][Ps] |
| | 23920 | | [fU][Ps][mA][Ps][mG][fC][mU][fG][mC][fC][mC][fA][mG][fU][mU][fU][Ps][mC][Ps][fA][Ps][3XGalNac] |
| 971 | 13921_{—} | C3-m-21 | [5Phos][mU][Ps][fA][Ps][mU][fU][mU][fC][mU][fC][mU][fG][mU][fA][mG][fG][Ps][mC][Ps][fU][Ps][mC][Ps] |
| | 23921 | | [fC][Ps][mA][Ps][mC][fC][mU][fA][mC][fA][mG][fA][mG][fA][mA][fA][Ps][mU][Ps][fA][Ps][3XGalNac] |
| 972 | 13922_{—} | C3-m-22 | [5Phos][mU][Ps][fU][Ps][mG][fC][mC][fU][mU][fG][mG][fC][mC][fU][mU][fU][Ps][mU][Ps][fC][Ps][mC][Ps] |
| | 23922 | | [fU][Ps][mU][Ps][mA][fA][mA][fG][mG][fC][mC][fA][mA][fG][mG][fC][Ps][mA][Ps][fA][Ps][3XGalNac] |
| 973 | 13923_{—} | C3-m-23 | [5Phos][mU][Ps][fC][Ps][mA][fG][mA][fG][mA][fG][mA][fA][mG][fA][mC][fC][Ps][mU][Ps][fU][Ps][mG][Ps] |
| | 23923 | | [fA][Ps][mC][Ps][mG][fG][mU][fC][mU][fU][mC][fU][mC][fU][mC][fU][Ps][mG][Ps][fA][Ps][3XGalNac] |
| 974 | 13924_{—} | C3-m-24 | [5Phos][mU][Ps][fA][Ps][mA][fU][mU][fU][mC][fU][mC][fU][mG][fU][mA][fG][Ps][mG][Ps][fC][Ps][mU][Ps] |
| | 23924 | | [fC][Ps][mC][Ps][mC][fU][mA][fC][mA][fG][mA][fG][mA][fA][mA][fU][Ps][mU][Ps][fA][Ps][3XGalNac] |
| 975 | 13925_{—} | C3-m-25 | [5Phos][mU][Ps][fU][Ps][mU][fU][mC][fU][mC][fU][mG][fU][mA][fG][mG][fC][Ps][mU][Ps][fC][Ps][mC][Ps] |
| | 23925 | | [fA][Ps][mC][Ps][mG][fC][mC][fU][mA][fC][mA][fG][mA][fG][mA][fA][Ps][mA][Ps][fA][Ps][3XGalNac] |
| 976 | 13926_{—} | C3-m-26 | [5Phos][mU][Ps][fG][Ps][mG][fG][mC][fC][mA][fG][mU][fG][mC][fU][mC][fC][Ps][mA][Ps][fC][Ps][mC][Ps] |
| | 23926 | | [fC][Ps][mA][Ps][mG][fG][mA][fG][mC][fA][mC][fU][mG][fG][mC][fC][Ps][mC][Ps][fA][Ps][3XGalNac] |
| 977 | 13927_{—} | C3-m-27 | [5Phos][mU][Ps][fG][Ps][mA][fC][mA][fU][mA][fG][mU][fG][mG][fC][mA][fU][Ps][mC][Ps][fC][Ps][mU][Ps] |
| | 23927 | | [fG][Ps][mG][Ps][mA][fU][mG][fC][mC][fA][mC][fU][mA][fU][mG][fU][Ps][mC][Ps][fA][Ps][3XGalNac] |
| 978 | 13928_{—} | C3-m-28 | [5Phos][mU][Ps][fC][Ps][mA][fU][mU][fC][mU][fG][mA][fU][mU][fC][mC][fU][Ps][mU][Ps][fC][Ps][mC][Ps] |
| | 23928 | | [fG][Ps][mG][Ps][mA][fG][mG][fA][mA][fU][mC][fA][mG][fA][mA][fU][Ps][mG][Ps][fA][Ps][3XGalNac] |
| 979 | 13929_{—} | C3-m-29 | [5Phos][mU][Ps][fU][Ps][mU][fC][mA][fU][mU][fG][mA][fG][mC][fC][mA][fA][Ps][mC][Ps][fG][Ps][mC][Ps] |
| | 23929 | | [fA][Ps][mC][Ps][mU][fU][mG][fG][mC][fU][mC][fA][mA][fU][mG][fA][Ps][mA][Ps][fA][Ps][3XGalNac] |
| 980 | 13930_{—} | C3-m-30 | [5Phos][mU][Ps][fC][Ps][mC][fA][mG][fG][mU][fA][mG][fA][mU][fG][mA][fU][Ps][mG][Ps][fA][Ps][mG][Ps] |
| | 23930 | | [fG][Ps][mG][Ps][mA][fU][mC][fA][mU][fC][mU][fA][mC][fC][mU][fG][Ps][mG][Ps][fA][Ps][3XGalNac] |
| 981 | 13931_{—} | C3-m-31 | [5Phos][mU][Ps][fG][Ps][mC][fA][mA][fU][mU][fC][mU][fC][mC][fU][mC][fA][Ps][mG][Ps][fC][Ps][mA][Ps] |
| | 23931 | | [fC][Ps][mA][Ps][mU][fG][mA][fG][mG][fA][mG][fA][mA][fU][mU][fG][Ps][mC][Ps][fA][Ps][3XGalNac] |
| 982 | 13932_{—} | C3-m-32 | [5Phos][mU][Ps][fU][Ps][mA][fG][mG][fC][mU][fC][mG][fG][mA][fU][mC][fU][Ps][mU][Ps][fC][Ps][mC][Ps] |
| | 23932 | | [fA][Ps][mC][Ps][mA][fG][mA][fU][mC][fC][mG][fA][mG][fC][mC][fU][Ps][mA][Ps][fA][Ps][3XGalNac] |
| 983 | 13933_{—} | C3-m-33 | [5Phos][mU][Ps][fG][Ps][mC][fC][mA][fU][mG][fA][mU][fG][mU][fA][mC][fU][Ps][mC][Ps][fG][Ps][mU][Ps] |
| | 23933 | | [fC][Ps][mA][Ps][mA][fG][mU][fA][mC][fA][mU][fC][mA][fU][mG][fG][Ps][mC][Ps][fA][Ps][3XGalNac] |
| 984 | 13934_{—} | C3-m-34 | [5Phos][mU][Ps][fA][Ps][mA][fA][mG][fU][mC][fA][mU][fU][mG][fG][mA][fC][Ps][mA][Ps][fG][Ps][mC][Ps] |
| | 23934 | | [fU][Ps][mG][Ps][mG][fU][mC][fC][mA][fA][mU][fG][mA][fC][mU][fU][Ps][mU][Ps][fA][Ps][3XGalNac] |
| 985 | 13935_{—} | C3-m-35 | [5Phos][mU][Ps][fC][Ps][mA][fU][mA][fC][mU][fU][mG][fG][mA][fG][mA][fU][Ps][mG][Ps][fU][Ps][mA][Ps] |
| | 23935 | | [fU][Ps][mC][Ps][mA][fU][mC][fU][mC][fC][mA][fA][mG][fU][mA][fU][Ps][mG][Ps][fA][Ps][3XGalNac] |
| 986 | 13936_{—} | C3-m-36 | [5Phos][mU][Ps][fU][Ps][mG][fG][mA][fG][mA][fU][mG][fU][mA][fU][mC][fU][Ps][mG][Ps][fU][Ps][mC][Ps] |
| | 23936 | | [fA][Ps][mA][Ps][mA][fG][mA][fU][mA][fC][mA][fU][mC][fU][mC][fC][Ps][mA][Ps][fA][Ps][3XGalNac] |
| 987 | 13937_{—} | C3-m-37 | [5Phos][mU][Ps][fG][Ps][mU][fG][mA][fU][mG][fG][mA][fG][mU][fC][mU][fU][Ps][mU][Ps][fC][Ps][mA][Ps] |
| | 23937 | | [fA][Ps][mA][Ps][mA][fA][mG][fA][mC][fU][mC][fC][mA][fU][mC][fA][Ps][mC][Ps][fA][Ps][3XGalNac] |
| 988 | 13938_{—} | C3-m-38 | [5Phos][mU][Ps][fC][Ps][mA][fC][mA][fG][mU][fG][mU][fA][mG][fG][mA][fU][Ps][mC][Ps][fU][Ps][mC][Ps] |
| | 23938 | | [fU][Ps][mG][Ps][mA][fU][mC][fC][mU][fA][mC][fA][mC][fU][mG][fU][Ps][mG][Ps][fA][Ps][3XGalNac] |
| 989 | 13939_{—} | C3-m-39 | [5Phos][mU][Ps][fC][Ps][mU][fG][mU][fG][mA][fC][mU][fG][mU][fG][mA][fA][Ps][mA][Ps][fC][Ps][mC][Ps] |
| | 23939 | | [fC][Ps][mU][Ps][mU][fU][mC][fA][mC][fA][mG][fU][mC][fA][mC][fA][Ps][mG][Ps][fA][Ps][3XGalNac] |
| 990 | 13940_{—} | C3-m-40 | [5Phos][mU][Ps][fC][Ps][mA][fG][mA][fA][mU][fC][mU][fC][mC][fC][mA][fC][Ps][mG][Ps][fU][Ps][mG][Ps] |
| | 23940 | | [fG][Ps][mU][Ps][mG][fU][mG][fG][mG][fA][mG][fA][mU][fU][mC][fU][Ps][mG][Ps][fA][Ps][3XGalNac] |
| 991 | 13941_{—} | C3-m-41 | [5Phos][mU][Ps][fC][Ps][mU][fG][mC][fU][mU][fU][mA][fG][mU][fG][mA][fU][Ps][mG][Ps][fC][Ps][mU][Ps] |
| | 23941 | | [fG][Ps][mC][Ps][mA][fU][mC][fA][mC][fU][mA][fA][mA][fG][mC][fA][Ps][mG][Ps][fA][Ps][3XGalNac] |
| 992 | 13942_{—} | C3-m-42 | [5Phos][mU][Ps][fU][Ps][mG][fA][mG][fG][mG][fU][mG][fU][mU][fC][mC][fU][Ps][mA][Ps][fU][Ps][mC][Ps] |
| | 23942 | | [fG][Ps][mG][Ps][mA][fG][mG][fA][mA][fC][mA][fC][mC][fC][mU][fC][Ps][mA][Ps][fA][Ps][3XGalNac] |
| 993 | 13943_{—} | C3-m-43 | [5Phos][mU][Ps][fA][Ps][mG][fC][mA][fU][mG][fG][mU][fA][mC][fA][mU][fU][Ps][mG][Ps][fU][Ps][mC][Ps] |
| | 23943 | | [fA][Ps][mC][Ps][mA][fA][mU][fG][mU][fA][mC][fC][mA][fU][mG][fC][Ps][mU][Ps][fA][Ps][3XGalNac] |
| 994 | 13944_{—} | C3-m-44 | [5Phos][mU][Ps][fG][Ps][mA][fG][mG][fG][mU][fG][mU][fU][mC][fC][mU][fA][Ps][mU][Ps][fC][Ps][mG][Ps] |
| | 23944 | | [fG][Ps][mA][Ps][mU][fA][mG][fG][mA][fA][mC][fA][mC][fC][mC][fU][Ps][mC][Ps][fA][Ps][3XGalNac] |
| 995 | 13945_{—} | C3-m-45 | [5Phos][mU][Ps][fG][Ps][mU][fA][mG][fA][mA][fU][mU][fU][mC][fU][mC][fU][Ps][mG][Ps][fU][Ps][mA][Ps] |
| | 23945 | | [fG][Ps][mG][Ps][mA][fG][mA][fG][mA][fA][mA][fU][mU][fC][mU][fA][Ps][mC][Ps][fA][Ps][3XGalNac] |
| 996 | 13946_{—} | C3-m-46 | [5Phos][mU][Ps][fG][Ps][mG][fU][mG][fA][mA][fC][mU][fU][mU][fG][mA][fA][Ps][mA][Ps][fG][Ps][mC][Ps] |
| | 23946 | | [fU][Ps][mA][Ps][mU][fU][mC][fA][mA][fA][mG][fU][mU][fC][mA][fC][Ps][mC][Ps][fA][Ps][3XGalNac] |
| 997 | 13947_{—} | C3-m-47 | [5Phos][mU][Ps][fC][Ps][mC][fA][mU][fG][mU][fU][mG][fA][mC][fG][mA][fG][Ps][mU][Ps][fU][Ps][mC][Ps] |
| | 23947 | | [fC][Ps][mG][Ps][mC][fU][mC][fG][mU][fC][mA][fA][mC][fA][mU][fG][Ps][mG][Ps][fA][Ps][3XGalNac] |
| 998 | 13948_{—} | C3-m-48 | [5Phos][mU][Ps][fG][Ps][mA][fU][mG][fC][mA][fG][mG][fU][mA][fA][mU][fU][Ps][mG][Ps][fU][Ps][mU][Ps] |
| | 23948 | | [fG][Ps][mG][Ps][mA][fA][mU][fU][mA][fC][mC][fU][mG][fC][mA][fU][Ps][mC][Ps][fA][Ps][3XGalNac] |
| 999 | 13949_{—} | C3-m-49 | [5Phos][mU][Ps][fG][Ps][mU][fA][mC][fC][mU][fG][mG][fU][mA][fC][mA][fG][Ps][mA][Ps][fU][Ps][mC][Ps] |
| | 23949 | | [fU][Ps][mC][Ps][mC][fU][mG][fU][mA][fC][mC][fA][mG][fG][mU][fA][Ps][mC][Ps][fA][Ps][3XGalNac] |
| 1000 | 13950_{—} | C3-m-50 | [5Phos][mU][Ps][fU][Ps][mA][fA][mU][fU][mG][fU][mU][fG][mG][fA][mG][fU][Ps][mU][Ps][fG][Ps][mC][Ps] |
| | 23950 | | [fC][Ps][mC][Ps][mA][fC][mU][fC][mC][fA][mA][fC][mA][fA][mU][fU][Ps][mA][Ps][fA][Ps][3XGalNac] |
| 1001 | 13951_{—} | C3-m-51 | [5Phos][mU][Ps][fA][Ps][mA][fU][mU][fG][mU][fU][mG][fG][mA][fG][mU][fU][Ps][mG][Ps][fC][Ps][mC][Ps] |
| | 23951 | | [fC][Ps][mA][Ps][mA][fA][mC][fU][mC][fC][mA][fA][mC][fA][mA][fU][Ps][mU][Ps][fA][Ps][3XGalNac] |
| 1002 | 13952_{—} | C3-m-52 | [5Phos][mU][Ps][fC][Ps][mG][fC][mC][fA][mU][fC][mC][fU][mG][fG][mA][fU][Ps][mC][Ps][fC][Ps][mC][Ps] |
| | 23952 | | [fG][Ps][mA][Ps][mA][fU][mC][fC][mA][fG][mG][fA][mU][fG][mG][fC][Ps][mG][Ps][fA][Ps][3XGalNac] |
| 1003 | 13953_{—} | C3-m-53 | [5Phos][mU][Ps][fG][Ps][mA][fA][mU][fU][mU][fC][mU][fC][mU][fG][mU][fA][Ps][mG][Ps][fG][Ps][mC][Ps] |
| | 23953 | | [fU][Ps][mC][Ps][mU][fA][mC][fA][mG][fA][mG][fA][mA][fA][mU][fU][Ps][mC][Ps][fA][Ps][3XGalNac] |
| 1004 | 13954_{—} | C3-m-54 | [5Phos][mU][Ps][fC][Ps][mA][fA][mA][fG][mU][fC][mU][fU][mU][fU][mA][fG][Ps][mC][Ps][fU][Ps][mG][Ps] |
| | 23954 | | [fC][Ps][mA][Ps][mC][fU][mA][fA][mA][fA][mG][fA][mC][fU][mU][fU][Ps][mG][Ps][fA][Ps][3XGalNac] |
| 1005 | 13955_{—} | C3-m-55 | [5Phos][mU][Ps][fC][Ps][mG][fA][mG][fU][mU][fC][mC][fG][mG][fA][mA][fU][Ps][mG][Ps][fU][Ps][mC][Ps] |
| | 23955 | | [fC][Ps][mC][Ps][mA][fU][mU][fC][mC][fG][mG][fA][mA][fC][mU][fC][Ps][mG][Ps][fA][Ps][3XGalNac] |
| 1006 | 13956_{—} | C3-m-56 | [5Phos][mU][Ps][fA][Ps][mA][fG][mC][fA][mA][fU][mU][fC][mU][fC][mC][fU][Ps][mC][Ps][fA][Ps][mG][Ps] |
| | 23956 | | [fC][Ps][mA][Ps][mA][fG][mG][fA][mG][fA][mA][fU][mU][fG][mC][fU][Ps][mU][Ps][fA][Ps][3XGalNac] |
| 1007 | 13957_{—} | C3-m-57 | [5Phos][mU][Ps][fA][Ps][mA][fC][mG][fA][mU][fG][mU][fU][mC][fU][mC][fU][Ps][mU][Ps][fC][Ps][mU][Ps] |
| | 23957 | | [fG][Ps][mC][Ps][mA][fG][mA][fG][mA][fA][mC][fA][mU][fC][mG][fU][Ps][mU][Ps][fA][Ps][3XGalNac] |
| 1008 | 13958_{—} | C3-m-58 | [5Phos][mU][Ps][fG][Ps][mG][fA][mU][fC][mC][fC][mG][fA][mA][fG][mA][fU][Ps][mG][Ps][fA][Ps][mC][Ps] |
| | 23958 | | [fA][Ps][mA][Ps][mA][fU][mC][fU][mU][fC][mG][fG][mG][fA][mU][fC][Ps][mC][Ps][fA][Ps][3XGalNac] |
| 1009 | 13959_{—} | C3-m-59 | [5Phos][mU][Ps][fA][Ps][mG][fA][mG][fC][mU][fU][mG][fU][mU][fC][mA][fG][Ps][mC][Ps][fU][Ps][mU][Ps] |
| | 23959 | | [fU][Ps][mC][Ps][mC][fU][mG][fA][mA][fC][mA][fA][mG][fC][mU][fC][Ps][mU][Ps][fA][Ps][3XGalNac] |
| 1010 | 13960_{—} | C3-m-60 | [5Phos][mU][Ps][fU][Ps][mA][fG][mA][fC][mA][fU][mA][fG][mU][fG][mG][fC][Ps][mA][Ps][fU][Ps][mC][Ps] |
| | 23960 | | [fC][Ps][mU][Ps][mG][fC][mC][fA][mC][fU][mA][fU][mG][fU][mC][fU][Ps][mA][Ps][fA][Ps][3XGalNac] |
| 1011 | 13961_{—} | C3-m-61 | [5Phos][mU][Ps][fG][Ps][mG][fU][mA][fA][mU][fU][mG][fU][mU][fG][mG][fA][Ps][mG][Ps][fU][Ps][mU][Ps] |
| | 23961 | | [fG][Ps][mC][Ps][mU][fC][mC][fA][mA][fC][mA][fA][mU][fU][mA][fC][Ps][mC][Ps][fA][Ps][3XGalNac] |
| 1012 | 13962_{—} | C3-m-62 | [5Phos][mU][Ps][fC][Ps][mU][fG][mA][fU][mU][fC][mC][fU][mU][fC][mC][fG][Ps][mG][Ps][fC][Ps][mA][Ps] |
| | 23962 | | [fC][Ps][mG][Ps][mC][fG][mG][fA][mA][fG][mG][fA][mA][fU][mC][fA][Ps][mG][Ps][fA][Ps][3XGalNac] |
| 1013 | 13963_{—} | C3-m-63 | [5Phos][mU][Ps][fG][Ps][mA][fA][mA][fC][mC][fC][mU][fC][mA][fU][mU][fU][Ps][mU][Ps][fC][Ps][mC][Ps] |
| | 23963 | | [fU][Ps][mU][Ps][mA][fA][mA][fU][mG][fA][mG][fG][mG][fU][mU][fU][Ps][mC][Ps][fA][Ps][3XGalNac] |
| 1014 | 13964_{—} | C3-m-64 | [5Phos][mU][Ps][fA][Ps][mU][fC][mA][fU][mA][fG][mU][fG][mU][fU][mC][fU][Ps][mU][Ps][fG][Ps][mG][Ps] |
| | 23964 | | [fC][Ps][mA][Ps][mA][fG][mA][fA][mC][fA][mC][fU][mA][fU][mG][fA][Ps][mU][Ps][fA][Ps][3XGalNac] |
| 1015 | 13965_{—} | C3-m-65 | [5Phos][mU][Ps][fG][Ps][mU][fG][mC][fU][mG][fG][mU][fU][mU][fU][mA][fU][Ps][mG][Ps][fG][Ps][mU][Ps] |
| | 23965 | | [fG][Ps][mA][Ps][mA][fU][mA][fA][mA][fA][mC][fC][mA][fG][mC][fA][Ps][mC][Ps][fA][Ps][3XGalNac] |
| 1016 | 13966_{—} | C3-m-66 | [5Phos][mU][Ps][fA][Ps][mA][fA][mG][fG][mG][fC][mA][fU][mU][fC][mC][fU][Ps][mG][Ps][fG][Ps][mU][Ps] |
| | 23966 | | [fU][Ps][mU][Ps][mA][fG][mG][fA][mA][fU][mG][fC][mC][fC][mU][fU][Ps][mU][Ps][fA][Ps][3XGalNac] |
| 1017 | 13967_{—} | C3-m-67 | [5Phos][mU][Ps][fC][Ps][mC][fA][mG][fG][mU][fU][mA][fC][mU][fC][mC][fU][Ps][mG][Ps][fG][Ps][mC][Ps] |
| | 23967 | | [fC][Ps][mA][Ps][mA][fG][mG][fA][mG][fU][mA][fA][mC][fC][mU][fG][Ps][mG][Ps][fA][Ps][3XGalNac] |
| 1018 | 13968_{—} | C3-m-68 | [5Phos][mU][Ps][fA][Ps][mA][fG][mU][fC][mU][fU][mU][fU][mA][fG][mC][fU][Ps][mG][Ps][fC][Ps][mA][Ps] |
| | 23968 | | [fG][Ps][mU][Ps][mA][fG][mC][fU][mA][fA][mA][fA][mG][fA][mC][fU][Ps][mU][Ps][fA][Ps][3XGalNac] |
| 1019 | 13969_{—} | C3-m-69 | [5Phos][mU][Ps][fU][Ps][mG][fG][mG][fU][mU][fG][mU][fC][mU][fG][mA][fA][Ps][mG][Ps][fG][Ps][mC][Ps] |
| | 23969 | | [fC][Ps][mA][Ps][mU][fU][mC][fA][mG][fA][mC][fA][mA][fC][mC][fC][Ps][mA][Ps][fA][Ps][3XGalNac] |
| 1020 | 13970_{—} | C3-m-70 | [5Phos][mU][Ps][fC][Ps][mC][fA][mG][fC][mU][fC][mA][fU][mA][fC][mU][fU][Ps][mG][Ps][fG][Ps][mA][Ps] |
| | 23970 | | [fG][Ps][mA][Ps][mA][fA][mG][fU][mA][fU][mG][fA][mG][fC][mU][fG][Ps][mG][Ps][fA][Ps][3XGalNac] |
| 1021 | 13971_{—} | C3-m-71 | [5Phos][mU][Ps][fG][Ps][mA][fA][mG][fU][mC][fC][mU][fG][mC][fA][mU][fU][Ps][mA][Ps][fC][Ps][mU][Ps] |
| | 23971 | | [fG][Ps][mU][Ps][mA][fA][mU][fG][mC][fA][mG][fG][mA][fC][mU][fU][Ps][mC][Ps][fA][Ps][3XGalNac] |
| 1022 | 13972_{—} | C3-m-72 | [5Phos][mU][Ps][fC][Ps][mA][fG][mA][fU][mC][fU][mU][fA][mC][fU][mC][fU][Ps][mG][Ps][fC][Ps][mG][Ps] |
| | 23972 | | [fU][Ps][mC][Ps][mA][fG][mA][fG][mU][fA][mA][fG][mA][fU][mC][fU][Ps][mG][Ps][fA][Ps][3XGalNac] |
| 1023 | 13973_{—} | C3-m-73 | [5Phos][mU][Ps][fG][Ps][mG][fG][mC][fU][mU][fC][mU][fG][mC][fU][mU][fC][Ps][mU][Ps][fC][Ps][mC][Ps] |
| | 23973 | | [fA][Ps][mG][Ps][mG][fA][mA][fG][mC][fA][mG][fA][mA][fG][mC][fC][Ps][mC][Ps][fA][Ps][3XGalNac] |
| 1024 | 13974_{—} | C3-m-74 | [5Phos][mU][Ps][fC][Ps][mU][fG][mG][fU][mU][fU][mU][fA][mU][fG][mG][fU][Ps][mG][Ps][fA][Ps][mC][Ps] |
| | 23974 | | [fC][Ps][mU][Ps][mA][fC][mC][fA][mU][fA][mA][fA][mA][fC][mC][fA][Ps][mG][Ps][fA][Ps][3XGalNac] |
| 1025 | 13975 | C3-m-75 | [5Phos][mU][Ps][fG][Ps][mG][fC][mA][fC][mC][fC][mA][fA][mA][fG][mA][C][Ps][mA][Ps][fA][Ps][mC][Ps] |
| | 23975 | | [fC][Ps][mA][Ps][mG][fU][mC][fU][mU][fU][mG][fG][mG][fU][mG][fC][Ps][mC][Ps][fA][Ps][3XGalNac] |
| 1026 | 13976_{—} | C3-m-76 | [5Phos][mU][Ps][fA][Ps][mG][fC][mU][fC][mU][fU][mG][fG][mU][fU][mC][fU][Ps][mG][Ps][fC][Ps][mC][Ps] |
| | 23976 | | [fG][Ps][mG][Ps][mA][fG][mA][fA][mC][fC][mA][fA][mG][fA][mG][fC][Ps][mU][Ps][fA][Ps][3XGalNac] |
| 1027 | 13977_{—} | C3-m-77 | [5Phos][mU][Ps][fG][Ps][mG][fA][mA][fG][mU][fU][mG][fA][mC][fG][mU][fU][Ps][mG][Ps][fA][Ps][mG][Ps] |
| | 23977 | | [fG][Ps][mG][Ps][mA][fA][mC][fG][mU][fC][mA][fA][mC][fU][mU][fC][Ps][mC][Ps][fA][Ps][3XGalNac] |
| 1028 | 13978_{—} | C3-m-78 | [5Phos][mU][Ps][fG][Ps][mC][fA][mG][fA][mG][fC][mU][fG][mG][fG][mU][fU][Ps][mG][Ps][fU][Ps][mC][Ps] |
| | 23978 | | [fU][Ps][mG][Ps][mA][fA][mC][fC][mC][fA][mG][fC][mU][fC][mU][fG][Ps][mC][Ps][fA][Ps][3XGalNac] |
| 1029 | 13979_{—} | C3-m-79 | [5Phos][mU][Ps][fA][Ps][mU][fA][mG][fU][mC][fC][mA][fC][mU][fC][mC][fU][Ps][mG][Ps][fG][Ps][mC][Ps] |
| | 23979 | | [fU][Ps][mC][Ps][mA][fG][mG][fA][mG][fU][mG][fG][mA][fC][mU][fA][Ps][mU][Ps][fA][Ps][3XGalNac] |
| 1030 | 13980_{—} | C3-m-80 | [5Phos][mU][Ps][fU][Ps][mC][fG][mA][fA][mU][fU][mU][fA][mU][fU][mA][fC][Ps][mA][Ps][fG][Ps][mG][Ps] |
| | 23980 | | [fU][Ps][mG][Ps][mG][fU][mA][fA][mU][fA][mA][fA][mU][fU][mC][fG][Ps][mA][Ps][fA][Ps][3XGalNac] |
| 1031 | 13981_{—} | C3-m-81 | [5Phos][mU][Ps][fA][Ps][mG][fA][mA][fU][mU][fU][mC][fU][mC][fU][mG][fU][Ps][mA][Ps][fG][Ps][mG][Ps] |
| | 23981 | | [fC][Ps][mU][Ps][mA][fC][mA][fG][mA][fG][mA][fA][mA][fU][mU][fC][Ps][mU][Ps][fA][Ps][3XGalNac] |
| 1032 | 13982_{—} | C3-m-82 | [5Phos][mU][Ps][fA][Ps][mG][fU][mG][fU][mU][fC][mU][fU][mG][fG][mC][fA][Ps][mU][Ps][fC][Ps][mC][Ps] |
| | 23982 | | [fU][Ps][mG][Ps][mU][fG][mC][fC][mA][fA][mG][fA][mA][fC][mA][fC][Ps][mU][Ps][fA][Ps][3XGalNac] |
| 1033 | 13983_{—} | C3-m-83 | [5Phos][mU][Ps][fG][Ps][mA][fA][mA][fC][mG][fA][mU][fG][mU][fU][mC][fU][Ps][mC][Ps][fU][Ps][mU][Ps] |
| | 23983 | | [fC][Ps][mU][Ps][mA][fG][mA][fA][mC][fA][mU][fC][mG][fU][mU][fU][Ps][mC][Ps][fA][Ps][3XGalNac] |
| 1034 | 13984_{—} | C3-m-84 | [5Phos][mU][Ps][fA][Ps][mG][fU][mA][fG][mG][fC][mU][fC][mG][fG][mA][fU][Ps][mC][Ps][fU][Ps][mU][Ps] |
| | 23984 | | [fC][Ps][mC][Ps][mA][fU][mC][fC][mG][fA][mG][fC][mC][fU][mA][fC][Ps][mU][Ps][fA][Ps][3XGalNac] |
| 1035 | 13985_{—} | C3-m-85 | [5Phos][mU][Ps][fU][Ps][mC][fU][mC][fC][mU][fC][mA][fG][mC][fA][mC][fA][Ps][mG][Ps][fC][Ps][mG][Ps] |
| | 23985 | | [fG][Ps][mC][Ps][mU][fG][mU][fG][mC][fU][mG][fA][mG][fG][mA][fG][Ps][mA][Ps][fA][Ps][3XGalNac] |
| 1036 | 13986_{—} | C3-m-86 | [5Phos][mU][Ps][fU][Ps][mG][fC][mG][fC][mA][fC][mC][fG][mU][fG][mA][fU][Ps][mG][Ps][fC][Ps][mU][Ps] |
| | 23986 | | [fC][Ps][mA][Ps][mA][fU][mC][fA][mC][fG][mG][fU][mG][fC][mG][fC][Ps][mA][Ps][fA][Ps][3XGalNac] |
| 1037 | 13987_{—} | C3-m-87 | [5Phos][mU][Ps][fU][Ps][mG][fU][mA][fC][mU][fC][mG][fU][mC][fA][mA][fA][Ps][mG][Ps][fU][Ps][mC][Ps] |
| | 23987 | | [fA][Ps][mU][Ps][mU][fU][mU][fG][mA][fC][mG][fA][mG][fU][mA][fC][Ps][mA][Ps][fA][Ps][3XGalNac] |
| 1038 | 13988_{—} | C3-m-88 | [5Phos][mU][Ps][fC][Ps][mC][fG][mU][fG][mA][fG][mG][fG][mC][fC][mA][fU][Ps][mG][Ps][fU][Ps][mC][Ps] |
| | 23988 | | [fU][Ps][mU][Ps][mA][fU][mG][fG][mC][fC][mC][fU][mC][fA][mC][fG][Ps][mG][Ps][fA][Ps][3XGalNac] |
| 1039 | 13989_{—} | C3-m-89 | [5Phos][mU][Ps][fG][Ps][mG][fU][mU][fC][mU][fC][mA][fA][mU][fG][mU][fU][Ps][mG][Ps][fA][Ps][mC][Ps] |
| | 23989 | | [fC][Ps][mA][Ps][mA][fA][mC][fA][mU][fU][mG][fA][mG][fA][mA][fC][Ps][mC][Ps][fA][Ps][3XGalNac] |
| 1040 | 13990_{—} | C3-m-90 | [5Phos][mU][Ps][fC][Ps][mU][fG][mA][fC][mA][fC][mC][fG][mU][fC][mA][fC][Ps][mU][Ps][fG][Ps][mA][Ps] |
| | 23990 | | [fU][Ps][mG][Ps][mG][fU][mG][fA][mC][fG][mG][fU][mG][fU][mC][fA][Ps][mG][Ps][fA][Ps][3XGalNac] |
| 1041 | 13991_{—} | C3-m-91 | [5Phos][mU][Ps][fA][Ps][mU][fG][mA][fC][mC][fU][mC][fG][mA][fA][mA][fC][Ps][mU][Ps][fG][Ps][mG][Ps] |
| | 23991 | | [fG][Ps][mC][Ps][mG][fU][mU][fU][mC][fG][mA][fG][mG][fU][mC][fA][Ps][mU][Ps][fA][Ps][3XGalNac] |
| 1042 | 13992_{—} | C3-m-92 | [5Phos][mU][Ps][fU][Ps][mG][fA][mG][fG][mU][fC][mG][fA][mA][fU][mU][fU][Ps][mA][Ps][fU][Ps][mU][Ps] |
| | 23992 | | [fA][Ps][mC][Ps][mA][fA][mA][fU][mU][fC][mG][fA][mC][fC][mU][fC][Ps][mA][Ps][fA][Ps][3XGalNac] |
| 1043 | 13993_{—} | C3-m-93 | [5Phos][mU][Ps][fC][Ps][mU][fC][mA][fU][mU][fU][mU][fC][mC][fU][mU][fG][Ps][mG][Ps][fU][Ps][mC][Ps] |
| | 23993 | | [fU][Ps][mC][Ps][mC][fA][mA][fG][mG][fA][mA][fA][mA][fU][mG][fA][Ps][mG][Ps][fA][Ps][3XGalNac] |
| 1044 | 13994_{—} | C3-m-94 | [5Phos][mU][Ps][fA][Ps][mC][fU][mU][fU][mU][fG][mU][fA][mU][fG][mA][fA][Ps][mG][Ps][fC][Ps][mA][Ps] |
| | 23994 | | [fA][Ps][mU][Ps][mU][fU][mC][fA][mU][fA][mC][fA][mA][fA][mA][fG][Ps][mU][Ps][fA][Ps][3XGalNac] |
| 1045 | 13995_{—} | C3-m-95 | [5Phos][mU][Ps][fG][Ps][mA][fG][mU][fG][mU][fG][mA][fG][mA][fC][mC][fU][Ps][mU][Ps][fG][Ps][mU][Ps] |
| | 23995 | | [fC][Ps][mC][Ps][mA][fG][mG][fU][mC][fU][mC][fA][mC][fA][mC][fU][Ps][mC][Ps][fA][Ps][3XGalNac] |
| 1046 | 13996_{—} | C3-m-96 | [5Phos][mU][Ps][fC][Ps][mG][fA][mA][fU][mU][fU][mA][fU][mU][fA][mC][fA][Ps][mG][Ps][fG][Ps][mU][Ps] |
| | 23996 | | [fG][Ps][mA][Ps][mU][fG][mU][fA][mA][fU][mA][fA][mA][fU][mU][fC][Ps][mG][Ps][fA][Ps][3XGalNac] |
| 1047 | 13997_{—} | C3-m-97 | [5Phos][mU][Ps][fC][Ps][mA][fA][mC][fC][mU][fG][mC][fA][mC][fC][mU][fC][Ps][mA][Ps][fU][Ps][mC][Ps] |
| | 23997 | | [fC][Ps][mG][Ps][mG][fA][mG][fG][mU][fG][mC][fA][mG][fG][mU][fU][Ps][mG][Ps][fA][Ps][3XGalNac] |
| 1048 | 13998_{—} | C3-m-98 | [5Phos][mU][Ps][fC][Ps][mA][fG][mA][fG][mU][fG][mU][fG][mA][fG][mA][fC][Ps][mC][Ps][fU][Ps][mU][Ps] |
| | 23998 | | [fG][Ps][mU][Ps][mG][fU][mC][fU][mC][fA][mC][fA][mC][fU][mC][fU][Ps][mG][Ps][fA][Ps][3XGalNac] |
| 1049 | 13999_{—} | C3-m-99 | [5Phos][mU][Ps][fA][Ps][mU][fC][mU][fC][mU][fG][mU][fU][mC][fA][mU][fU][Ps][mG][Ps][fA][Ps][mG][Ps] |
| | 23999 | | [fC][Ps][mC][Ps][mA][fA][mU][fG][mA][fA][mC][fA][mG][fA][mG][fA][Ps][mU][Ps][fA][Ps][3XGalNac] |
| 1050 | 14000_{—} | C3-m-100 | [5Phos][mU][Ps][fA][Ps][mG][fA][mA][fG][mU][fC][mC][fU][mG][fC][mA][fU][Ps][mU][Ps][fA][Ps][mC][Ps] |
| | 24000 | | [fU][Ps][mG][Ps][mA][fU][mG][fC][mA][fG][mG][fA][mC][fU][mU][fC][Ps][mU][Ps][fA][Ps][3XGalNac] |

Note =
each of the above constructs may or may not have a phosphate modification at the 5′ end group. Furthermore, and independently, each of the above constructs may or may not have a “3x GalNAc” coupled to the 3′ end group. Optional are constructs with a 3x GalNAc ligand, in particular a toothbrush ligand as defined herein. Particularly optional are constructs which in addition have a 5′ phosphate, even though this is not a strict requirement, given that in the absence thereof, mammalian cells will add such phosphate in case it is absent from the molecule as administered.

[0389] Specific notes about the nomenclature in Tables 3a to 3c:
[0390] fN: 2′-Fluoro residues
[0391] mN: 2′-O-methyl residues
[0392] Ps: phosphorothioate
[0393] p, Phos: phosphate
[0394] (GalNAc): Sirnaomics mono-GalNAc building block

[0395] It should also be noted that the scope of the present disclosure extends to sequences that correspond to those in the Tables above, and wherein the 5′ terminal nucleoside of the antisense (guide) strand (first region as defined in the claims herein) can include any nucleobase that can be present in an RNA molecule, in other words can be any of adenine (A), uracil (U), guanine (G) or cytosine (C). Additionally, the scope of the present disclosure extends to sequences that correspond to those in the Tables above, and wherein the 3′ terminal nucleoside of the sense (passenger) strand (second region as defined in the claims herein) can include any nucleobase that can be present in an RNA molecule, in other words can be any of adenine (A), uracil (U), guanine (G) or cytosine (C), optionally however a nucleobase that is complementary to the 5′ nucleobase of the antisense (guide) strand (first region as defined in the claims herein).

[0396] While the methods are shown and described as being a series of acts that are performed in a particular sequence, it is to be understood and appreciated that the methods are not limited by the order of the sequence. For example, some acts can occur in a different order than what is described herein. In addition, an act can occur concurrently with another act. Further, in some instances, not all acts may be required to implement a method described herein.

[0397] The order of the steps of the methods described herein is exemplary, but the steps may be carried out in any suitable order, or simultaneously where appropriate. Additionally, steps may be added or substituted in, or individual steps may be deleted from any of the methods without departing from the scope of the subject matter described herein. Aspects of any of the Examples described above may be combined with aspects of any of the other Examples described to form further Examples.

[0398] It will be understood that the above description of an optional embodiment is given by way of example only and that various modifications may be made by those skilled in the art. What has been described above includes Examples of one or more embodiments. It is, of course, not possible to describe every conceivable modification and alteration of the above compounds, compositions or methods for purposes of describing the aforementioned aspects, but one of ordinary skill in the art can recognize that many further modifications and permutations of various aspects are possible. Accordingly, the described aspects are intended to embrace all such alterations, modifications, and variations that fall within the scope of the appended claims.

### EXAMPLES

[0399] The following Examples illustrate certain embodiments of the present disclosure and are not limiting. Moreover, where specific embodiments are provided, the inventors have contemplated generic application of those specific embodiments. For example, disclosure of an oligonucleotide having a particular motif or modification patterns provides reasonable support for additional oligonucleotides having the same or similar motif or modification patterns.

[0400] The syntheses of the RNAi constructs according to the present disclosure and disclosed herein have been carried out using synthesis methods known to the person skilled in the art, such as synthesis methods disclosed in https://en.wikipedia.org/wiki/Oligonucleotide_synthesis (retrieved on 16 Feb. 2022), wherein the methods disclosed on this website are incorporated by reference herein in their entirety. The only difference to the synthesis method disclosed in this reference is that GalNAc phosphoramidite immobilized on a support is used in the synthesis method during the first synthesis step.

### Example 1

### Materials and Methods

### Cell Culture:

[0401] Human primary hepatocytes (5 donor pooled—Sekisui XenoTech, HPCH05+) were thawed immediately prior to experimentation and cultured in 1× complete Williams medium (Gibco, A1217601) supplemented with Hepatocytes plating supplement pack (Gibco, CM3000). FBS concentration was modified from manufacture recipe to a final 2.5% (as opposed to 5%) for compound stability.

[0402] 1× Complete WEM: 2.5% FBS, 1 μM Dexamethasone, Pen/Strep (100 U/mL/100 μg/mL), 4 μg/ml Human Insulin, 2 mM GlutaMAX, 15 mM HEPES, pH 7.4.

[0403] Hepatocytes were plated on Collagen I (rat tail) coated 96 well tissue culture plates (Gibco, A1142803).

### C3 Target Identification and Compound Preparation:

[0404] Oligomeric compounds targeting C3 were identified by bioinformatic analysis on human C3 mRNA sequence as given in RefSeq sequence ID NM_000064.2. 100 compounds were selected for synthesis as both asymmetric duplexes (14 nucleotide sense strand, 19 nucleotide antisense strand) and as mxRNA hairpins. Compounds were dissolved to 50 uM in molecular biology grade water. Duplexes were annealed by heating at 95° C. for 5 minutes followed by gradual cooling to room temperature. mxRNAs were annealed by heating at 95° C. for 5 minutes followed by rapid cooling on ice.

### C3—Primary Screen:

[0405] On the day of transfection, primary human hepatocytes were thawed in 45 mL of human OptiThaw (Sekisui XenoTech, K8000) and centrifuged down at 200 g for 5 minutes. Cells were resuspended in 2× complete WEM and counted. Cells were then plated in 50 μL of 2× complete WEM at 25,000 cells per well on 96 well type 1 rat tail Collagen plates and allowed to rest and attach for four hours before transfection. After rest, the compounds were diluted further to 2 μM in basal WEM. 50 μL of each 2 μM compound was added to respective triplicates of the plated hepatocytes for a final concentration of 1 μM in a volume of 100 uL 1× complete WEM.

### C3—Secondary Screen:

[0406] Based on data from the primary screen, a narrower set of the best performing 27 C3-targeting mxRNA constructs were tested in dose curves. Compounds were diluted further to 2 μM in basal WEM. A seven step, five fold dilution series was prepared in basal WEM from 2 μM to 0.000128 μM. 50 μL of each dilution was added to respective triplicates of the plated hepatocytes for a final dilution series of 1 μM down to 0.000064 μM in a volume of 100 uL 1× complete WEM.

[0407] 72 hours post transfection, cells were harvested and RNA isolated using the PureLink Pro 96 total RNA Purification Kit (ThermoFisher, 12173011A) according to the manufacturer protocol. Harvested RNA was assayed for C3 expression via Taqman qPCR using the Luna Universal Probe One-Step RT-qPCR Kit (NEB, E3006). A qPCR assay was performed for each sample using a C3 TaqMan probe set (Hs00163811_ml-FAM) multiplexed with a common GAPDH VIC probe (ThermoFisher, 4326317E). Thermocycling and data acquisition was performed with an Applied Biosystems QuantStudio 3/5 Real-Time PCR System.

### Example 2

### Results

[0408] The results of the primary screens are shown in FIG. 1.

[0409] Table 4 includes results of the secondary screens and below shows IC50 values (in nM) for 27 optional constructs selected in accordance with the Examples. Max % KD indicates the maximally achieved knock-down at 1000 nM with 0% being no knock-down and 100% full knock-down. M4K4 and NTC were used as references.

| Experimental | | |
|---|---|---|
| denotation | | |
| (see Table 3c) | Max % KD | IC50 |
| C3-m-57 | 73.04736 | 14.58 |
| C3-m-66 | 66.811078 | 66.12 |
| C3-m-56 | 70.291495 | 29.45 |
| C3-m-95 | 66.064052 | 35.79 |
| C3-m-42 | 64.857652 | 37.96 |
| C3-m-83 | 62.502061 | 339.1 |
| C3-m-68 | 60.974262 | 101.9 |
| C3-m-82 | 61.815101 | 50.01 |
| C3-m-36 | 43.195248 | 1035 |
| C3-m-37 | 47.79636 | 698 |
| C3-m-05 | 54.917273 | 286.9 |
| C3-m-18 | 55.354467 | 193.9 |
| C3-m-27 | 52.852042 | 535.1 |
| C3-m-43 | 49.093483 | 708.5 |
| C3-m-01 | 24.073274 | 4866 |
| C3-m-02 | 40.864148 | 1481 |
| C3-m-74 | 52.782197 | 456.9 |
| C3-m-29 | 68.555051 | 38.48 |
| C3-m-45 | 57.946184 | 152.5 |
| C3-m-40 | 50.738094 | 689.5 |
| C3-m-17 | 57.817998 | 192.6 |
| C3-m-72 | 55.335632 | 248 |
| C3-m-64 | 54.589282 | 518.2 |
| C3-m-46 | 33.50449 | 2084 |
| C3-m-41 | 44.929703 | 410.5 |
| C3-m-99 | 47.277852 | 769.4 |
| C3-m-14 | 35.599471 | 1336 |
| M4K4 | −1.866053 | Unstable |

[0410] The IC50 data in the single- to low double-digit nanomolar range demonstrate outstanding performance of numerous constructs of the disclosure. Furthermore, no obvious toxicity was observed for each of the constructs.

[0411] Further results of the secondary screening and the outstanding performance of the above disclosed constructs in Table 4 above are shown in FIG. 2.

[0412] Table 5 below shows IC50 values (in nM) for 6 optional constructs selected in accordance with the Examples. Max % KD indicates the maximally achieved knock-down at 1000 nM with 0% being no knock-down and 100% full knock-down.

| Experimental denotation (see | | |
|---|---|---|
| Table 3c, the “m” is omitted) | Max KD % at 1000 nM | IC50 (nM) |
| C3-95 | 81.72 | 3.07 |
| C3-57 | 79.90 | 18.62 |
| C3-56 | 80.09 | 24.88 |
| C3-42 | 77.06 | 45.60 |

[0413] Further results of the constructs in Table 5 above with different concentrations are shown in FIG. 3.

[0414] Table 5 and FIG. 3 show C3 large scale preparations mirrored the screening synthesis very closely. Constructs C3-95, C3-57, C3-56 and C3-42 elicited significant reduction in C3 gene expression, wherein C3-57 and C-95 showed a knock down of around 80%.

### Example 3

Complement Component C3 (mxRNA) Targeting Leads for Candidate in Humanized Liver-uPA-SCID Mice Model, Non-GLP

[0415] The protocol is represented in its original wording. Therefore, any use of future tense of verbs means that the experiments have already been carried out.

### 1. Study Objective(s)

[0416] The objective of this non-GLP study is to evaluate, in humanized liver-uPA-SCID mice, the dose response of GalNAc conjugated human complement component C3 targeting mxRNA constructs. The compound(s) will be administered subcutaneously, and the mice will be survived for up to 14 days.

[0417] At necropsy, 3 liver biopsies (2 mm) per animal will be preserved in separate vials in RNAlater, flash frozen, and stored at −80° C. Three more liver biopsies (2 mm) will be taken, flash frozen in the same vial, and stored at −80° C. The remaining liver will be flash frozen and stored at −80° C.

### 2. Regulatory Compliance

[0418] This non-GLP study will not be conducted in accordance with the Food and Drug Administration's Good Laboratory Practice (GLP) regulations (21 CFR Part 58).

### 3. Animal Welfare Compliance

[0419] This protocol has been reviewed and approved by the Test Facility IACUC Committee.

### 4. Test System Information

### 4.1. Animal Test

[0420] 4.1.1. Common Name: Mouse
[0421] 4.1.2. Breed/Class: Rodent—humanized liver-uPA-SCID mice model
[0422] 4.1.3. Number of Animals (by gender): 32 μMale PXB all naïve

### 4.2. Acclimation Period:

### 4.2.1. Duration:

[0423] All animals will be acclimated for a minimum period of five (5) days prior to release by the Attending veterinarian, at which time the overall health of the animals will be evaluated. Animals which are not released from acclimation will be treated accordingly and further evaluation will be performed prior to release. All records from the acclimation period will remain in the study file.
[0424] 4.2.2. Required medication and/or vaccination:
   [0425] All rodents received will come from a vendor that is certified to be free of any lethal parasites that may affect the facility's total colony.
   [0426] All rodents must be accompanied by a sentinel report including statistical analysis.
   [0427] Each shipment of rodents must be housed separately from others in the facility.
[0428] 4.3. Animal Identification Method and Location:

[0429] Animals will be assigned sequential numbers. The animals will be ear notched to permanently identify each animal. This method involves punching holes or notches in the ear pinna while anesthetized. Alternatively, the animals may have a tattoo placed on their tail. A cage card will also be affixed to each animal cage denoting the animal number, gender, vendor, strain, study director, and study number.

### 5. Study Design

### 5.1. Design Details

[0430] This study will have one type of mice, N=32. Animals will be grouped by treatment type, dosage, and survival period. Each animal will be treated by subcutaneous injection of test material. Animals will be survived for 14 days. See study table 1 for details.

[0431] At necropsy, three 2 mm biopsy punches will be taken from the left, middle and right liver lobes, placed in separate vials, soaked in RNAlater for 15 minutes, flash frozen and stored at −80° C. Another three 2 mm liver biopsies from the left, middle and right liver lobes will be placed into one vial, flash frozen and stored at −80° C. The rest of the liver will be flash frozen and stored in 10 mL conical tubes at −80° C.

| Terminal timepoint | Control (PBS) | C3-95 | C3-57 |
|---|---|---|---|
| Week 2 | Group 1A | Group 4A | Group 5A |
| | (N = 4) | (5 mg/kg) | (5 mg/kg) |
| | | (N = 4) | (N = 4) |
| | | Group 4B | Group 5B |
| | | (10 mg/kg) | (10 mg/kg) |
| | | (N = 5) | (N = 5) |
| | | Group 4C | Group 5BC |
| | | (30 mg/kg) | (30 mg/kg) |
| | | (N = 5) | (N = 5) |

[0432] The study schedule is shown in FIG. 4.

TABLE 6
Dose information

| | | Treatment | | |
|---|---|---|---|---|
| | | Subcutaneous | | |
| | Number of | Injection | Survival | Pre-Euthanasia and |
| Group | Animals | Day 0 | Days | Necropsy |
| 1A | 4 | Control (PBS) | 14 | Pre-Euthanasia: |
| 4A | 4 | C3-95 (5 mg/kg) | 14 | Plasma and |
| 4B | 5 | C3-95 (10 mg/kg) | 14 | collection. |
| 4C | 5 | C3-95 (30 mg/kg) | 14 | Necropsy: |
| 5A | 4 | C3-57 (5 mg/kg) | 14 | 2 mm biopsy of left, |
| 5B | 5 | C3-57 (10 mg/kg) | 14 | middle and right liver |
| 5C | 5 | C3-57 (30 mg/kg) | 14 | lobes in separate |
| Spares | 0 | | | vials, in RNAlater for |
| Total | 32 | | | 15 min, flash freeze |
| | | | | then stored at −80° C. |
| | | | | 2 mm biopsy of left, |
| | | | | middle and right liver |
| | | | | all in one vial, flash |
| | | | | freeze then stored |
| | | | | at −80° C. |
| | | | | Rest of liver, flash |
| | | | | freeze then stored |
| | | | | at −80° C. |

Note =
“C3-57” and C3-95” are the same compounds as “C3-m-57” and “C3-m-95” in Table 3c.

### 6. Test Article and Ancillary Material Information

[0433] Test Drug 3:
[0434] Identification: C3-95
[0435] Manufacturer: Sirnaomics
[0436] Description: GalNAc-mxRNA targeting human Complement C3 mRNA
[0437] Lot/Batch Number: Will be recorded on study materials form.
[0438] Expiration Date: Will be recorded on study materials form.
[0439] Storage Temperature: 4° C.
[0440] Bio-Hazard Status: None
[0441] MSDS*: TBD
[0442] Appearance: Clear Liquid
[0443] Dose Information: See Table 1
[0444] Residual Test Article Storage: None
[0445] Test Drug 4:
[0446] Identification: C3-57
[0447] Manufacturer: Sirnaomics
[0448] Description: GalNAc-mxRNA targeting human Complement C3 mRNA
[0449] Lot/Batch Number: Will be recorded on study materials form.
[0450] Expiration Date: Will be recorded on study materials form.
[0451] Storage Temperature: 4° C.
[0452] Bio-Hazard Status: None
[0453] MSDS*: TBD
[0454] Appearance: Clear Liquid
[0455] Dose Information: See Table 1
[0456] Residual Test Article Storage: None

### Results

[0457] Results of the C3 gene knock down by constructs C3-95 and C3-57 in humanized liver-uPA-SCID mice are shown in the Tables below.

TABLE 8a
Results of C3 gene knockdown for construct C3-95 (see Table
3c for structure) at two weeks using different doses

| C3-95* | |
|---|---|
| 5 mg/kg | 56% KD |
| 10 mg/kg | 59% KD |
| 30 mg/kg | 74% KD |

*Construct shown in Table 3c; “m” has been omitted from the experimental denotation

TABLE 8b
Results of C3 gene knockdown for construct C3-57 (see Table
3c for structure) at two weeks using different doses

| C3-57* | |
|---|---|
| 5 mg/kg | 8% KD |
| 10 mg/kg | 29% KD |
| 30 mg/kg | 47% KD |

*Construct shown in in Table 3c; “m” has been omitted from the experimental denotation.

[0458] The results of the mouse study are also shown in FIG. 5.

### Example 4

Evaluation of Duration Effect of Human Complement C3 Targeting mxRNA, in the Humanized Liver-uPA-SCID Mice (PXB) Model

[0459] The protocol is represented in its original wording. Therefore, any use of future tense of verbs means that the experiments have already been carried out.

### 1. Study Objective(s)

[0460] The objective of this non-GLP study is to evaluate, in humanized liver-uPA-SCID (PXB) mice: the duration effect of Human Complement C3 targeting mxRNA.

[0461] The compound(s) will be administered subcutaneously, and the mice will be survived for up to 84 days.

[0462] Prior to necropsy, blood will be collected for plasma samples. At necropsy, 3 liver biopsies (2 mm) per animal will be preserved in separate vials in RNAlater, flash frozen, and stored at −80° C. Three more liver biopsies (2 mm) will be taken, flash frozen in the same vial, and stored at −80° C. The remaining liver will be flash frozen and stored at −80° C.

### 2. Study Design

### 2.1. Design Details

[0463] This study will have one type of mice, PXB. Animals will be grouped by treatment type, dosage, and survival period. Each animal will be treated by subcutaneous injection of test material. (Note: that the injection must be given subcutaneously. The test articles will not be functional if the subcutaneous site is missed, and injection is given within the muscular region or test articles are injected into the vein/bloodstream).
[0464] Group 1A, 1B, 1C, and 1D will have five animals and receive a single control dose of PBS.
[0465] Group 2A, 2B, 2C, and 2D will have five animals and receive a single dose of Human Complement C3 targeting mxRNA at 30 mg/kg.

[0466] Animals will be survived for 14, 28, 56, and 84 days. See FIG. 6 and Table 9 for details.

TABLE 9
Study table

| | | | Treatment | | | |
|---|---|---|---|---|---|---|
| | Number | | Subcutaneous | | | |
| | of | Mouse | Injection | Survival | | Pre-Euthanasia and |
| Group | Animals | Type | Day 0 | Days | Blood | Necropsy |
| 1A | 5 | PXB | Control (PBS) | 14 | Blood collected | Pre-Euthanasia: Plasma |
| 1B | 5 | PXB | Control (PBS) | 28 | for plasma. | and collection. |
| 1C | 5 | PXB | Control (PBS) | 56 | Plasma will be | Necropsy: |
| 1D | 5 | PXB | Control (PBS) | 84 | evenly | 2 mm biopsy of left, middle |
| 2A | 5 | PXB | C3-95 30 mg/kg | 14 | separated into | and right liver lobes in |
| 2B | 5 | PXB | C3-95 30 mg/kg | 28 | two labeled | separate vials, in RNAlater |
| 2C | 5 | PXB | C3-95 30 mg/kg | 56 | vials. | for 15 min, flash freeze then |
| 2D | 5 | PXB | C3-95 30 mg/kg | 84 | | stored at −80° C. |
| | | | | | | 2 mm biopsy of left, middle |
| | | | | | | and right liver all in one vial, |
| | | | | | | flash freeze then stored |
| | | | | | | at −80° C. |
| | | | | | | Rest of liver, flash freeze |
| | | | | | | then stored at −80° C. |

Note =
The structure of C3-95 is shown in Table 3c under the experimental denotation “C3-m-95”.

### 2.2. Randomization Procedures

[0467] None, animals will be numbered and treated sequentially.

### 2.3. Route of Administration

[0468] Subcutaneous injection in the scruff. An injection volume of 200 uL.

[0469] (Note: that the injection must be given subcutaneously. The test articles will not be functional if the subcutaneous site is missed, and injection is given within the muscular region or test articles are injected into the vein/bloodstream).

### 3. Test Article and Ancillary Material Information

### 3.1. Test Drug 1:

[0470] 3.1.1. Identification: C3-95
[0471] 3.1.2. Manufacturer: Sirnaomics
[0472] 3.1.3. Description: GalNAc-muRNA targeting human Complement C3 mRNA
[0473] 3.1.4. Lot/Batch Number: Will be recorded on study materials form.
[0474] 3.1.5. Expiration Date: Will be recorded on study materials form.
[0475] 3.1.6. Storage Temperature: 4° C.
[0476] 3.1.7. Bio-Hazard Status: None
[0477] 3.1.8. MSDS*: TBD
[0478] 3.1.9. Appearance: Clear Liquid
[0479] 3.1.10. Dose Information: See Table 1
[0480] 3.1.11. Residual Test Article Storage: None
[0481] *MSDS: Material Safety Data Sheet

[0482] Note=C3-95 is shown in Table 3c under the experimental denotation C3-m-95.

### Results

[0483] The results of the study are shown in FIG. 7.

[0484] FIG. 7 shows the following duration response in terms of knock down (KD) of the C3 gene expression:
[0485] 62% KD of C3 mRNA at week 2
[0486] 57% KD of C3 mRNA at week 4
[0487] 12% KD of C3 mRNA at week 8
[0488] Return to control levels at week 12.

1. An oligomeric compound for inhibiting expression of complement component C3, wherein the compound comprises a single nucleotide strand, wherein said single strand consists of a modified or unmodified oligonucleotide comprising a first nucleobase sequence selected from the group consisting of SEQ ID NOs: 1 to 250 linked directly to a second nucleobase sequence selected respectively from the group consisting of SEQ ID NOs: 251 to 500, wherein said single strand has a total length of 33 or 34 nucleosides.

2. (canceled)

3. The oligomeric compound according to claim 1, wherein the modified or unmodified nucleotide has a nucleobase sequence that consists of: SEQ ID Nos: 57 and 307, 66 and 316, 56 and 306, 95 and 345, 42 and 292, 83 and 333, 68 and 318, 82 and 332, 36 and 286, 37 and 287, 5 and 255, 18 and 268, 27 and 277, 43 and 293, 1 and 25, 2 and 252, 74 and 324, 29 and 279, 45 and 295, 40 and 290, 17 and 267, 72 and 322, 64 and 314, 46 and 296, 41 and 291, 99 and 349, and 14 and 264.

4-12. (canceled)

13. The oligomeric compound according to claim 1, which further comprises one or more ligands.

14. The oligomeric compound according to claim 13, wherein said one or more ligands are conjugated to the second region of linked nucleosides and/or the first region of linked nucleosides.

15. The oligomeric compound according to claim 14, wherein said one or more ligands are conjugated at the 3′ terminal nucleoside of the second region of linked nucleosides and/or the 5′ terminal nucleoside of the second region of linked nucleosides.

16. The oligomeric compound according to claim 13, wherein said one or more ligands bind cellular membrane or a specific target on cellular surface.

17-20. (canceled)

21. The oligomeric compound according to claim 16, wherein said one or more ligands comprise one or more N-Acetyl-Galactosamine moieties.

22-23. (canceled)

24. The oligomeric compound according to claim 21, wherein the one or more N-Acetyl-Galactosamine moieties are attached to the oligomeric compound as a biantennary or triantennary configuration.

25-31. (canceled)

32. The oligomeric compound according to claim 1, wherein the said single strand has a nucleobase sequence SEQ ID NOs: 557, 566, 556, 595, 542, 583, 568, 582, 536, 537, 505, 518, 527, 543, 501, 502, 574, 529, 545, 540, 517, 572, 564, 546, 541, 599, and 514.

33. The oligomeric compound according to claim 32, wherein the single strand is selected from the group consisting of SEQ ID NOs: 1007, 1016, 1006, 1045, 992, 1033, 1018, 1032, 986, 987, 955, 968, 977, 993, 951, 952, 1024, 979, 995, 990, 967, 1022, 1014, 996, 991, 1049, and 964.

34-36. (canceled)

37. The oligomeric compound according to claim 1, which comprises internucleoside linkages and wherein at least one internucleoside linkage is a modified internucleoside linkage.

38-39. (canceled)

40. The oligomeric compound according to claim 37, which comprises 7, 8, 9 or 10 phosphorothioate or phosphorodithioate internucleoside linkages.

41-44. (canceled)

45. The oligomeric compound according to claim 1, wherein at least one nucleoside comprises a modified sugar selected from the group consisting of a 2′-O-alkyl modified sugar, 2′-O-methyl modified sugar, 2′-O-methoxyethyl modified sugar, 2′-O-allyl modified sugar, 2′-C-allyl modified sugar, 2′-deoxy modified sugar, 2′-F modified sugar, 2′-arabino-fluoro modified sugar, 2′-O-benzyl modified sugar, and 2′-O-methyl-4-pyridine modified sugar.

46-77. (canceled)

78. The oligomeric compound according to claim 1, wherein the first region is selected from the group consisting of SEQ ID NOs: 807 and 907, 816 and 916, 806 and 906, 845 and 945, 792 and 892, 833 and 933, 818 and 918, 832 and 932, 786 and 886, 787 and 887, 755 and 855, 768 and 868, 777 and 877, 793 and 893, 751 and 851, 752 and 852, 824 and 924, 779 and 879, 795 and 895, 790 and 890, 767 and 867, 822 and 922, 814 and 914, 796 and 896, 791 and 891, 849 and 949, 764 and 864.

79-81. (canceled)

82. A nucleic acid construct comprising at least:
(a) a first nucleic acid portion that is at least partially complementary to at least a first portion of an RNA, which is transcribed from an C3 gene;
(b) a second nucleic acid portion that is at least partially complementary to at least a second portion of an RNA, which is transcribed from an C3 gene, the second portion being different from the first portion;
(c) a third nucleic acid portion that is at least partially complementary to the first nucleic acid portion of (a), so as to form a first nucleic acid duplex region therewith;
(d) a fourth nucleic acid portion that is at least partially complementary to the second nucleic acid portion of (b), so as to form a second nucleic acid duplex region therewith,
wherein the construct is designed such that subsequent to in vivo administration the construct disassembles to yield at least first and second discrete nucleic acid targeting molecules that respectively target the RNA portions transcribed from the target genes of (a) and (b);
whereby (i) the first nucleic acid targeting molecule is capable of modulating expression of the target gene of (a), and comprises, or is derived from, at least the first nucleic acid portion of (a), and (ii) the second nucleic acid targeting molecule is capable of modulating expression of the target gene of (b), and comprises, or is derived from, the second nucleic acid portion of (b).

83-153. (canceled)

154. The construct of claim 82, wherein
(a) the first nucleic acid portion is selected from the group consisting of SEQ ID Nos: 751-850;
(b) the second nucleic acid portion is selected from the group consisting of SEQ ID Nos: 751-850;
(c) the third nucleic acid portion is selected from the group consisting of SEQ ID Nos. 851-950; and/or
(d) the fourth nucleic acid portion is selected from the group consisting of SEQ ID Nos. 851-950.

155-162. (canceled)

163. A pharmaceutical composition comprising an oligomeric compound according to claim 1 and a pharmaceutically acceptable excipient, diluent, antioxidant, and/or preservative.

164-165. (canceled)

166. The pharmaceutical composition of claim 163, further comprising one or more further pharmaceutically active agents.

167-174. (canceled)

175. A method of treating a C3-associated disease or disorder or a disease requiring reduced C3 expression, comprising administering to a patient suffering from said disease or disorder a therapeutically effective amount of an oligomeric compound according to a claim 1, wherein said disease or disorder is selected from the group consisting of autoimmune disease, complement system dysfunction including aberrant upregulation of complement components such as C3, C3 glomerulopathy, Chronic obstructive pulmonary disease (COPD), paroxysmal nocturnal hemoglobinuria (PNH); age-related macular degeneration (AMD) and/or granuloma annulare (GA), warm autoimmune hemolytic anemia (wAIHA), and coronary artery disease (CAD); Alzheimer's disease (AD), Amyotrophic Lateral Sclerosis (ALS), schizophrenia, Parkinson's disease (PD), and prion diseases, such as Creutzfeldt-Jakob disease (CJD). For example, neuroinflammation in AD, ALS, schizophrenia, PD, and prion disease is associated with increased microglial and astrocyte activation and C3, lupis nephritis (LN), bullous pemphigoid, pemphius, pemphius vulgaris (PV) and pemphius foliaceus (PF) atypical hemolytic uremic syndrome (aHUS), atypical hemolytic uremic syndrome (aHUS), neuromyelitis optica (NMO), multifocal motor neuropathy (MMN), myasthenia gravis (MG), C3 glomerulonephritis, and systemic lupus erythmatosis.

176-178. (canceled)

179. The oligomeric compound according to claim 33, wherein the single strand is selected from the group consisting of SEQ ID NOs 1045 and 1007.

The application's sequence listing, which the Patent Office published only in electronic form, follows.

SEQUENCE LISTING (1050 sequences)

SEQ ID NO: 1 - RNA, 19 nt, synthetic construct
  source 1..19: mol_type = other RNA
taggctcggatcttccact

SEQ ID NO: 2 - RNA, 19 nt, synthetic construct
  source 1..19: mol_type = other RNA
agagagaagaccttgacca

SEQ ID NO: 3 - RNA, 19 nt, synthetic construct
  source 1..19: mol_type = other RNA
ccacacagatccctttctt

SEQ ID NO: 4 - RNA, 19 nt, synthetic construct
  source 1..19: mol_type = other RNA
gtgtagatggtcttgtctg

SEQ ID NO: 5 - RNA, 19 nt, synthetic construct
  source 1..19: mol_type = other RNA
cagagagaagaccttgacc

SEQ ID NO: 6 - RNA, 19 nt, synthetic construct
  source 1..19: mol_type = other RNA
cacacagatccctttcttg

SEQ ID NO: 7 - RNA, 19 nt, synthetic construct
  source 1..19: mol_type = other RNA
acgaacaccatgaggtcaa

SEQ ID NO: 8 - RNA, 19 nt, synthetic construct
  source 1..19: mol_type = other RNA
caccatgaggtcaaagggc

SEQ ID NO: 9 - RNA, 19 nt, synthetic construct
  source 1..19: mol_type = other RNA
aagaccttgaccacgtagg

SEQ ID NO: 10 - RNA, 19 nt, synthetic construct
  source 1..19: mol_type = other RNA
acaccatgaggtcaaaggg

SEQ ID NO: 11 - RNA, 19 nt, synthetic construct
  source 1..19: mol_type = other RNA
gaacaccatgaggtcaaag

SEQ ID NO: 12 - RNA, 19 nt, synthetic construct
  source 1..19: mol_type = other RNA
gaagaccttgaccacgtag

SEQ ID NO: 13 - RNA, 19 nt, synthetic construct
  source 1..19: mol_type = other RNA
gagaagaccttgaccacgt

SEQ ID NO: 14 - RNA, 19 nt, synthetic construct
  source 1..19: mol_type = other RNA
gggtcttgtacacatagtc

SEQ ID NO: 15 - RNA, 19 nt, synthetic construct
  source 1..19: mol_type = other RNA
accatgaggtcaaagggca

SEQ ID NO: 16 - RNA, 19 nt, synthetic construct
  source 1..19: mol_type = other RNA
ccatgaggtcaaagggcat

SEQ ID NO: 17 - RNA, 19 nt, synthetic construct
  source 1..19: mol_type = other RNA
aggagaattctggtctcag

SEQ ID NO: 18 - RNA, 19 nt, synthetic construct
  source 1..19: mol_type = other RNA
tggtattgagccaaggctt

SEQ ID NO: 19 - RNA, 19 nt, synthetic construct
  source 1..19: mol_type = other RNA
acagccagagagaagacct

SEQ ID NO: 20 - RNA, 19 nt, synthetic construct
  source 1..19: mol_type = other RNA
cgaaactgggcagcacgta

SEQ ID NO: 21 - RNA, 19 nt, synthetic construct
  source 1..19: mol_type = other RNA
aatttctctgtaggctcca

SEQ ID NO: 22 - RNA, 19 nt, synthetic construct
  source 1..19: mol_type = other RNA
gtgccttggccttttcctt

SEQ ID NO: 23 - RNA, 19 nt, synthetic construct
  source 1..19: mol_type = other RNA
ccagagagaagaccttgac

SEQ ID NO: 24 - RNA, 19 nt, synthetic construct
  source 1..19: mol_type = other RNA
gaatttctctgtaggctcc

SEQ ID NO: 25 - RNA, 19 nt, synthetic construct
  source 1..19: mol_type = other RNA
atttctctgtaggctccac

SEQ ID NO: 26 - RNA, 19 nt, synthetic construct
  source 1..19: mol_type = other RNA
cgggccagtgctccaccca

SEQ ID NO: 27 - RNA, 19 nt, synthetic construct
  source 1..19: mol_type = other RNA
agacatagtggcatcctgg

SEQ ID NO: 28 - RNA, 19 nt, synthetic construct
  source 1..19: mol_type = other RNA
tcattctgattccttccgg

SEQ ID NO: 29 - RNA, 19 nt, synthetic construct
  source 1..19: mol_type = other RNA
gttcattgagccaacgcac

SEQ ID NO: 30 - RNA, 19 nt, synthetic construct
  source 1..19: mol_type = other RNA
tccaggtagatgatgaggg

SEQ ID NO: 31 - RNA, 19 nt, synthetic construct
  source 1..19: mol_type = other RNA
agcaattctcctcagcaca

SEQ ID NO: 32 - RNA, 19 nt, synthetic construct
  source 1..19: mol_type = other RNA
gtaggctcggatcttccac

SEQ ID NO: 33 - RNA, 19 nt, synthetic construct
  source 1..19: mol_type = other RNA
ggccatgatgtactcgtca

SEQ ID NO: 34 - RNA, 19 nt, synthetic construct
  source 1..19: mol_type = other RNA
caaagtcattggacagctg

SEQ ID NO: 35 - RNA, 19 nt, synthetic construct
  source 1..19: mol_type = other RNA
tcatacttggagatgtatc

SEQ ID NO: 36 - RNA, 19 nt, synthetic construct
  source 1..19: mol_type = other RNA
ttggagatgtatctgtcaa

SEQ ID NO: 37 - RNA, 19 nt, synthetic construct
  source 1..19: mol_type = other RNA
ggtgatggagtctttcaaa

SEQ ID NO: 38 - RNA, 19 nt, synthetic construct
  source 1..19: mol_type = other RNA
ccacagtgtaggatctctg

SEQ ID NO: 39 - RNA, 19 nt, synthetic construct
  source 1..19: mol_type = other RNA
gctgtgactgtgaaaccct

SEQ ID NO: 40 - RNA, 19 nt, synthetic construct
  source 1..19: mol_type = other RNA
ccagaatctcccacgtggt

SEQ ID NO: 41 - RNA, 19 nt, synthetic construct
  source 1..19: mol_type = other RNA
cctgctttagtgatgctgc

SEQ ID NO: 42 - RNA, 19 nt, synthetic construct
  source 1..19: mol_type = other RNA
atgagggtgttcctatcgg

SEQ ID NO: 43 - RNA, 19 nt, synthetic construct
  source 1..19: mol_type = other RNA
tagcatggtacattgtcac

SEQ ID NO: 44 - RNA, 19 nt, synthetic construct
  source 1..19: mol_type = other RNA
tgagggtgttcctatcgga

SEQ ID NO: 45 - RNA, 19 nt, synthetic construct
  source 1..19: mol_type = other RNA
agtagaatttctctgtagg

SEQ ID NO: 46 - RNA, 19 nt, synthetic construct
  source 1..19: mol_type = other RNA
tggtgaactttgaaagcta

SEQ ID NO: 47 - RNA, 19 nt, synthetic construct
  source 1..19: mol_type = other RNA
cccatgttgacgagttccg

SEQ ID NO: 48 - RNA, 19 nt, synthetic construct
  source 1..19: mol_type = other RNA
agatgcaggtaattgttgg

SEQ ID NO: 49 - RNA, 19 nt, synthetic construct
  source 1..19: mol_type = other RNA
ggtacctggtacagatctc

SEQ ID NO: 50 - RNA, 19 nt, synthetic construct
  source 1..19: mol_type = other RNA
gtaattgttggagttgccc

SEQ ID NO: 51 - RNA, 19 nt, synthetic construct
  source 1..19: mol_type = other RNA
taattgttggagttgccca

SEQ ID NO: 52 - RNA, 19 nt, synthetic construct
  source 1..19: mol_type = other RNA
tcgccatcctggatcccga

SEQ ID NO: 53 - RNA, 19 nt, synthetic construct
  source 1..19: mol_type = other RNA
agaatttctctgtaggctc

SEQ ID NO: 54 - RNA, 19 nt, synthetic construct
  source 1..19: mol_type = other RNA
tcaaagtcttttagctgca

SEQ ID NO: 55 - RNA, 19 nt, synthetic construct
  source 1..19: mol_type = other RNA
acgagttccggaatgtccc

SEQ ID NO: 56 - RNA, 19 nt, synthetic construct
  source 1..19: mol_type = other RNA
gaagcaattctcctcagca

SEQ ID NO: 57 - RNA, 19 nt, synthetic construct
  source 1..19: mol_type = other RNA
aaacgatgttctcttctgc

SEQ ID NO: 58 - RNA, 19 nt, synthetic construct
  source 1..19: mol_type = other RNA
tggatcccgaagatgacaa

SEQ ID NO: 59 - RNA, 19 nt, synthetic construct
  source 1..19: mol_type = other RNA
cagagcttgttcagctttc

SEQ ID NO: 60 - RNA, 19 nt, synthetic construct
  source 1..19: mol_type = other RNA
atagacatagtggcatcct

SEQ ID NO: 61 - RNA, 19 nt, synthetic construct
  source 1..19: mol_type = other RNA
aggtaattgttggagttgc

SEQ ID NO: 62 - RNA, 19 nt, synthetic construct
  source 1..19: mol_type = other RNA
tctgattccttccggcacg

SEQ ID NO: 63 - RNA, 19 nt, synthetic construct
  source 1..19: mol_type = other RNA
tgaaaccctcattttcctt

SEQ ID NO: 64 - RNA, 19 nt, synthetic construct
  source 1..19: mol_type = other RNA
gatcatagtgttcttggca

SEQ ID NO: 65 - RNA, 19 nt, synthetic construct
  source 1..19: mol_type = other RNA
ggtgctggttttatggtga

SEQ ID NO: 66 - RNA, 19 nt, synthetic construct
  source 1..19: mol_type = other RNA
caaagggcattcctggttt

SEQ ID NO: 67 - RNA, 19 nt, synthetic construct
  source 1..19: mol_type = other RNA
tccaggttactcctggcca

SEQ ID NO: 68 - RNA, 19 nt, synthetic construct
  source 1..19: mol_type = other RNA
aaagtcttttagctgcagt

SEQ ID NO: 69 - RNA, 19 nt, synthetic construct
  source 1..19: mol_type = other RNA
ctgggttgtctgaaggcca

SEQ ID NO: 70 - RNA, 19 nt, synthetic construct
  source 1..19: mol_type = other RNA
tccagctcatacttggaga

SEQ ID NO: 71 - RNA, 19 nt, synthetic construct
  source 1..19: mol_type = other RNA
agaagtcctgcattactgt

SEQ ID NO: 72 - RNA, 19 nt, synthetic construct
  source 1..19: mol_type = other RNA
ccagatcttactctgcgtc

SEQ ID NO: 73 - RNA, 19 nt, synthetic construct
  source 1..19: mol_type = other RNA
cgggcttctgcttctccag

SEQ ID NO: 74 - RNA, 19 nt, synthetic construct
  source 1..19: mol_type = other RNA
gctggttttatggtgacct

SEQ ID NO: 75 - RNA, 19 nt, synthetic construct
  source 1..19: mol_type = other RNA
gggcacccaaagacaacca

SEQ ID NO: 76 - RNA, 19 nt, synthetic construct
  source 1..19: mol_type = other RNA
gagctcttggttctgccgg

SEQ ID NO: 77 - RNA, 19 nt, synthetic construct
  source 1..19: mol_type = other RNA
aggaagttgacgttgaggg

SEQ ID NO: 78 - RNA, 19 nt, synthetic construct
  source 1..19: mol_type = other RNA
ggcagagctgggttgtctg

SEQ ID NO: 79 - RNA, 19 nt, synthetic construct
  source 1..19: mol_type = other RNA
catagtccactcctggctc

SEQ ID NO: 80 - RNA, 19 nt, synthetic construct
  source 1..19: mol_type = other RNA
gtcgaatttattacaggtg

SEQ ID NO: 81 - RNA, 19 nt, synthetic construct
  source 1..19: mol_type = other RNA
tagaatttctctgtaggct

SEQ ID NO: 82 - RNA, 19 nt, synthetic construct
  source 1..19: mol_type = other RNA
tagtgttcttggcatcctg

SEQ ID NO: 83 - RNA, 19 nt, synthetic construct
  source 1..19: mol_type = other RNA
ggaaacgatgttctcttct

SEQ ID NO: 84 - RNA, 19 nt, synthetic construct
  source 1..19: mol_type = other RNA
tagtaggctcggatcttcc

SEQ ID NO: 85 - RNA, 19 nt, synthetic construct
  source 1..19: mol_type = other RNA
ttctcctcagcacagcggc

SEQ ID NO: 86 - RNA, 19 nt, synthetic construct
  source 1..19: mol_type = other RNA
gtgcgcaccgtgatgctca

SEQ ID NO: 87 - RNA, 19 nt, synthetic construct
  source 1..19: mol_type = other RNA
atgtactcgtcaaagtcat

SEQ ID NO: 88 - RNA, 19 nt, synthetic construct
  source 1..19: mol_type = other RNA
gccgtgagggccatgtctt

SEQ ID NO: 89 - RNA, 19 nt, synthetic construct
  source 1..19: mol_type = other RNA
gggttctcaatgttgacca

SEQ ID NO: 90 - RNA, 19 nt, synthetic construct
  source 1..19: mol_type = other RNA
cctgacaccgtcactgatg

SEQ ID NO: 91 - RNA, 19 nt, synthetic construct
  source 1..19: mol_type = other RNA
tatgacctcgaaactgggc

SEQ ID NO: 92 - RNA, 19 nt, synthetic construct
  source 1..19: mol_type = other RNA
ttgaggtcgaatttattac

SEQ ID NO: 93 - RNA, 19 nt, synthetic construct
  source 1..19: mol_type = other RNA
cctcattttccttggtctc

SEQ ID NO: 94 - RNA, 19 nt, synthetic construct
  source 1..19: mol_type = other RNA
gacttttgtatgaagcaat

SEQ ID NO: 95 - RNA, 19 nt, synthetic construct
  source 1..19: mol_type = other RNA
agagtgtgagaccttgtcc

SEQ ID NO: 96 - RNA, 19 nt, synthetic construct
  source 1..19: mol_type = other RNA
tcgaatttattacaggtga

SEQ ID NO: 97 - RNA, 19 nt, synthetic construct
  source 1..19: mol_type = other RNA
ccaacctgcacctcatccg

SEQ ID NO: 98 - RNA, 19 nt, synthetic construct
  source 1..19: mol_type = other RNA
tcagagtgtgagaccttgt

SEQ ID NO: 99 - RNA, 19 nt, synthetic construct
  source 1..19: mol_type = other RNA
tatctctgttcattgagcc

SEQ ID NO: 100 - RNA, 19 nt, synthetic construct
  source 1..19: mol_type = other RNA
aagaagtcctgcattactg

SEQ ID NO: 101 - RNA, 19 nt, synthetic construct
  source 1..19: mol_type = other RNA
tacagatctcaaggatcat

SEQ ID NO: 102 - RNA, 19 nt, synthetic construct
  source 1..19: mol_type = other RNA
tcggatcttccactggccc

SEQ ID NO: 103 - RNA, 19 nt, synthetic construct
  source 1..19: mol_type = other RNA
gaagtctcctgctttagtg

SEQ ID NO: 104 - RNA, 19 nt, synthetic construct
  source 1..19: mol_type = other RNA
aagcaattctcctcagcac

SEQ ID NO: 105 - RNA, 19 nt, synthetic construct
  source 1..19: mol_type = other RNA
cgaatttattacaggtgag

SEQ ID NO: 106 - RNA, 19 nt, synthetic construct
  source 1..19: mol_type = other RNA
tccaggctggataagctct

SEQ ID NO: 107 - RNA, 19 nt, synthetic construct
  source 1..19: mol_type = other RNA
tagtagcggatcttggcct

SEQ ID NO: 108 - RNA, 19 nt, synthetic construct
  source 1..19: mol_type = other RNA
tccaggttgtaataggcgt

SEQ ID NO: 109 - RNA, 19 nt, synthetic construct
  source 1..19: mol_type = other RNA
gtcatcatggatatgtcca

SEQ ID NO: 110 - RNA, 19 nt, synthetic construct
  source 1..19: mol_type = other RNA
tattggtgaactttgaaag

SEQ ID NO: 111 - RNA, 19 nt, synthetic construct
  source 1..19: mol_type = other RNA
aacagagtagggtagccgc

SEQ ID NO: 112 - RNA, 19 nt, synthetic construct
  source 1..19: mol_type = other RNA
catagtggcatcctggtct

SEQ ID NO: 113 - RNA, 19 nt, synthetic construct
  source 1..19: mol_type = other RNA
ttatctttggctgtggtca

SEQ ID NO: 114 - RNA, 19 nt, synthetic construct
  source 1..19: mol_type = other RNA
agggcataggatgtggcct

SEQ ID NO: 115 - RNA, 19 nt, synthetic construct
  source 1..19: mol_type = other RNA
gcctcttttctgtttccgg

SEQ ID NO: 116 - RNA, 19 nt, synthetic construct
  source 1..19: mol_type = other RNA
gatcgcaggaggctggcag

SEQ ID NO: 117 - RNA, 19 nt, synthetic construct
  source 1..19: mol_type = other RNA
acatagtccactcctggct

SEQ ID NO: 118 - RNA, 19 nt, synthetic construct
  source 1..19: mol_type = other RNA
cccagatcttactctgcgt

SEQ ID NO: 119 - RNA, 19 nt, synthetic construct
  source 1..19: mol_type = other RNA
gaaaccctcattttccttg

SEQ ID NO: 120 - RNA, 19 nt, synthetic construct
  source 1..19: mol_type = other RNA
gttctgccggtaattgtag

SEQ ID NO: 121 - RNA, 19 nt, synthetic construct
  source 1..19: mol_type = other RNA
agtcatcctcagagtgtga

SEQ ID NO: 122 - RNA, 19 nt, synthetic construct
  source 1..19: mol_type = other RNA
agggacttcctgacaccgt

SEQ ID NO: 123 - RNA, 19 nt, synthetic construct
  source 1..19: mol_type = other RNA
acgtactccttcacctcaa

SEQ ID NO: 124 - RNA, 19 nt, synthetic construct
  source 1..19: mol_type = other RNA
gagaattctggtctcagac

SEQ ID NO: 125 - RNA, 19 nt, synthetic construct
  source 1..19: mol_type = other RNA
aacaccatgaaggtggcct

SEQ ID NO: 126 - RNA, 19 nt, synthetic construct
  source 1..19: mol_type = other RNA
ccaaggcttggaacaccat

SEQ ID NO: 127 - RNA, 19 nt, synthetic construct
  source 1..19: mol_type = other RNA
tatctttggctgtggtcag

SEQ ID NO: 128 - RNA, 19 nt, synthetic construct
  source 1..19: mol_type = other RNA
tgtagttgcagcagtccag

SEQ ID NO: 129 - RNA, 19 nt, synthetic construct
  source 1..19: mol_type = other RNA
aaactgggcagcacgtact

SEQ ID NO: 130 - RNA, 19 nt, synthetic construct
  source 1..19: mol_type = other RNA
cgtagtatctctgttcatt

SEQ ID NO: 131 - RNA, 19 nt, synthetic construct
  source 1..19: mol_type = other RNA
gtaggctccactatgacct

SEQ ID NO: 132 - RNA, 19 nt, synthetic construct
  source 1..19: mol_type = other RNA
caggtaggtgtagtagcgg

SEQ ID NO: 133 - RNA, 19 nt, synthetic construct
  source 1..19: mol_type = other RNA
acaaaggccgtgagggcca

SEQ ID NO: 134 - RNA, 19 nt, synthetic construct
  source 1..19: mol_type = other RNA
tagaaccgggtacagcttt

SEQ ID NO: 135 - RNA, 19 nt, synthetic construct
  source 1..19: mol_type = other RNA
gggcataggatgtggcctc

SEQ ID NO: 136 - RNA, 19 nt, synthetic construct
  source 1..19: mol_type = other RNA
tggtgatggagtctttcaa

SEQ ID NO: 137 - RNA, 19 nt, synthetic construct
  source 1..19: mol_type = other RNA
atgacctcgaaactgggca

SEQ ID NO: 138 - RNA, 19 nt, synthetic construct
  source 1..19: mol_type = other RNA
aaaccctcattttccttgg

SEQ ID NO: 139 - RNA, 19 nt, synthetic construct
  source 1..19: mol_type = other RNA
tcaatggccatgatgtact

SEQ ID NO: 140 - RNA, 19 nt, synthetic construct
  source 1..19: mol_type = other RNA
tcgtcaaagtcattggaca

SEQ ID NO: 141 - RNA, 19 nt, synthetic construct
  source 1..19: mol_type = other RNA
cctcaccttgagctcttgg

SEQ ID NO: 142 - RNA, 19 nt, synthetic construct
  source 1..19: mol_type = other RNA
ccaggatcagccatttaac

SEQ ID NO: 143 - RNA, 19 nt, synthetic construct
  source 1..19: mol_type = other RNA
gaaacgatgttctcttctg

SEQ ID NO: 144 - RNA, 19 nt, synthetic construct
  source 1..19: mol_type = other RNA
cctgggaagtcgtggacag

SEQ ID NO: 145 - RNA, 19 nt, synthetic construct
  source 1..19: mol_type = other RNA
agaaggctttgtccagctc

SEQ ID NO: 146 - RNA, 19 nt, synthetic construct
  source 1..19: mol_type = other RNA
ctgacaccgtcactgatga

SEQ ID NO: 147 - RNA, 19 nt, synthetic construct
  source 1..19: mol_type = other RNA
gagatgcaggtaattgttg

SEQ ID NO: 148 - RNA, 19 nt, synthetic construct
  source 1..19: mol_type = other RNA
tgacaaaggcagttccctc

SEQ ID NO: 149 - RNA, 19 nt, synthetic construct
  source 1..19: mol_type = other RNA
gtcaaagtcttttagctgc

SEQ ID NO: 150 - RNA, 19 nt, synthetic construct
  source 1..19: mol_type = other RNA
agaatctcccacgtggtga

SEQ ID NO: 151 - RNA, 19 nt, synthetic construct
  source 1..19: mol_type = other RNA
accagtcgggtcttgtaca

SEQ ID NO: 152 - RNA, 19 nt, synthetic construct
  source 1..19: mol_type = other RNA
tgttcttggcatcctgagg

SEQ ID NO: 153 - RNA, 19 nt, synthetic construct
  source 1..19: mol_type = other RNA
agtagttccaccctcacct

SEQ ID NO: 154 - RNA, 19 nt, synthetic construct
  source 1..19: mol_type = other RNA
ccaggttgtaataggcgta

SEQ ID NO: 155 - RNA, 19 nt, synthetic construct
  source 1..19: mol_type = other RNA
gggcgcatcctcctggaag

SEQ ID NO: 156 - RNA, 19 nt, synthetic construct
  source 1..19: mol_type = other RNA
cagcggttcttatctttgg

SEQ ID NO: 157 - RNA, 19 nt, synthetic construct
  source 1..19: mol_type = other RNA
tgcattactgtgacctcga

SEQ ID NO: 158 - RNA, 19 nt, synthetic construct
  source 1..19: mol_type = other RNA
cctcaaactcagtggagaa

SEQ ID NO: 159 - RNA, 19 nt, synthetic construct
  source 1..19: mol_type = other RNA
ggagaaggctttgtccagc

SEQ ID NO: 160 - RNA, 19 nt, synthetic construct
  source 1..19: mol_type = other RNA
ctggatgaagaggtacccg

SEQ ID NO: 161 - RNA, 19 nt, synthetic construct
  source 1..19: mol_type = other RNA
tggattgtggagtagttcc

SEQ ID NO: 162 - RNA, 19 nt, synthetic construct
  source 1..19: mol_type = other RNA
tcatccaggttactcctgg

SEQ ID NO: 163 - RNA, 19 nt, synthetic construct
  source 1..19: mol_type = other RNA
ttccaccctcaccttgagc

SEQ ID NO: 164 - RNA, 19 nt, synthetic construct
  source 1..19: mol_type = other RNA
ttggcttcaaggaagtctc

SEQ ID NO: 165 - RNA, 19 nt, synthetic construct
  source 1..19: mol_type = other RNA
gagaaggctttgtccagct

SEQ ID NO: 166 - RNA, 19 nt, synthetic construct
  source 1..19: mol_type = other RNA
cggtgctggttttatggtg

SEQ ID NO: 167 - RNA, 19 nt, synthetic construct
  source 1..19: mol_type = other RNA
gccaccaccgtagtatctc

SEQ ID NO: 168 - RNA, 19 nt, synthetic construct
  source 1..19: mol_type = other RNA
tggctcacaggccttgtcc

SEQ ID NO: 169 - RNA, 19 nt, synthetic construct
  source 1..19: mol_type = other RNA
gtacagatctcaaggatca

SEQ ID NO: 170 - RNA, 19 nt, synthetic construct
  source 1..19: mol_type = other RNA
ctctgtaggttcatgtagt

SEQ ID NO: 171 - RNA, 19 nt, synthetic construct
  source 1..19: mol_type = other RNA
ccacagttttgttcattct

SEQ ID NO: 172 - RNA, 19 nt, synthetic construct
  source 1..19: mol_type = other RNA
gccaaggcttggaacacca

SEQ ID NO: 173 - RNA, 19 nt, synthetic construct
  source 1..19: mol_type = other RNA
ttggagttgcccacggtgc

SEQ ID NO: 174 - RNA, 19 nt, synthetic construct
  source 1..19: mol_type = other RNA
tgatcgcaggaggctggca

SEQ ID NO: 175 - RNA, 19 nt, synthetic construct
  source 1..19: mol_type = other RNA
cagaatctcccacgtggtg

SEQ ID NO: 176 - RNA, 19 nt, synthetic construct
  source 1..19: mol_type = other RNA
ccatgttgacgagttccgg

SEQ ID NO: 177 - RNA, 19 nt, synthetic construct
  source 1..19: mol_type = other RNA
aatatattcatgagcttcg

SEQ ID NO: 178 - RNA, 19 nt, synthetic construct
  source 1..19: mol_type = other RNA
gagcttgttcagctttcca

SEQ ID NO: 179 - RNA, 19 nt, synthetic construct
  source 1..19: mol_type = other RNA
aatgatgtcctcatccagg

SEQ ID NO: 180 - RNA, 19 nt, synthetic construct
  source 1..19: mol_type = other RNA
ttgtatgaagcaattctcc

SEQ ID NO: 181 - RNA, 19 nt, synthetic construct
  source 1..19: mol_type = other RNA
ccttggtctcttctgatcg

SEQ ID NO: 182 - RNA, 19 nt, synthetic construct
  source 1..19: mol_type = other RNA
cggtgatggtgacctccag

SEQ ID NO: 183 - RNA, 19 nt, synthetic construct
  source 1..19: mol_type = other RNA
tggataagctctacattaa

SEQ ID NO: 184 - RNA, 19 nt, synthetic construct
  source 1..19: mol_type = other RNA
tgcacctcatccgagcctg

SEQ ID NO: 185 - RNA, 19 nt, synthetic construct
  source 1..19: mol_type = other RNA
gcgtaatccttcccactgc

SEQ ID NO: 186 - RNA, 19 nt, synthetic construct
  source 1..19: mol_type = other RNA
agccaacgcacgacgggag

SEQ ID NO: 187 - RNA, 19 nt, synthetic construct
  source 1..19: mol_type = other RNA
tcaaggatcatagtgttct

SEQ ID NO: 188 - RNA, 19 nt, synthetic construct
  source 1..19: mol_type = other RNA
tgacctcgaaactgggcag

SEQ ID NO: 189 - RNA, 19 nt, synthetic construct
  source 1..19: mol_type = other RNA
ccaccacgtcccagatctt

SEQ ID NO: 190 - RNA, 19 nt, synthetic construct
  source 1..19: mol_type = other RNA
gttgatgctgagtttggcc

SEQ ID NO: 191 - RNA, 19 nt, synthetic construct
  source 1..19: mol_type = other RNA
acagttttgttcattctga

SEQ ID NO: 192 - RNA, 19 nt, synthetic construct
  source 1..19: mol_type = other RNA
ctggattgtggagtagttc

SEQ ID NO: 193 - RNA, 19 nt, synthetic construct
  source 1..19: mol_type = other RNA
caaggaagtctcctgcttt

SEQ ID NO: 194 - RNA, 19 nt, synthetic construct
  source 1..19: mol_type = other RNA
tggtctcttctgatcgcag

SEQ ID NO: 195 - RNA, 19 nt, synthetic construct
  source 1..19: mol_type = other RNA
taggctccactatgacctc

SEQ ID NO: 196 - RNA, 19 nt, synthetic construct
  source 1..19: mol_type = other RNA
cctgggttagagactgcac

SEQ ID NO: 197 - RNA, 19 nt, synthetic construct
  source 1..19: mol_type = other RNA
tgagaccttgtccaggtag

SEQ ID NO: 198 - RNA, 19 nt, synthetic construct
  source 1..19: mol_type = other RNA
gtccttttggtattgagcc

SEQ ID NO: 199 - RNA, 19 nt, synthetic construct
  source 1..19: mol_type = other RNA
agcggttcttatctttggc

SEQ ID NO: 200 - RNA, 19 nt, synthetic construct
  source 1..19: mol_type = other RNA
gagatgagaacaaaggccg

SEQ ID NO: 201 - RNA, 19 nt, synthetic construct
  source 1..19: mol_type = other RNA
tagtagaatttctctgtag

SEQ ID NO: 202 - RNA, 19 nt, synthetic construct
  source 1..19: mol_type = other RNA
caaggagtcctgcttgacc

SEQ ID NO: 203 - RNA, 19 nt, synthetic construct
  source 1..19: mol_type = other RNA
gcacgtactccttcacctc

SEQ ID NO: 204 - RNA, 19 nt, synthetic construct
  source 1..19: mol_type = other RNA
ccttgacttccacttcctg

SEQ ID NO: 205 - RNA, 19 nt, synthetic construct
  source 1..19: mol_type = other RNA
tagacatagtggcatcctg

SEQ ID NO: 206 - RNA, 19 nt, synthetic construct
  source 1..19: mol_type = other RNA
agtcaaagtcttttagctg

SEQ ID NO: 207 - RNA, 19 nt, synthetic construct
  source 1..19: mol_type = other RNA
agggattcaggcagggaaa

SEQ ID NO: 208 - RNA, 19 nt, synthetic construct
  source 1..19: mol_type = other RNA
tcatagtgttcttggcatc

SEQ ID NO: 209 - RNA, 19 nt, synthetic construct
  source 1..19: mol_type = other RNA
gcagcacgtactccttcac

SEQ ID NO: 210 - RNA, 19 nt, synthetic construct
  source 1..19: mol_type = other RNA
ctgtggtcagaaatttgtt

SEQ ID NO: 211 - RNA, 19 nt, synthetic construct
  source 1..19: mol_type = other RNA
cagagtagggtagccgcag

SEQ ID NO: 212 - RNA, 19 nt, synthetic construct
  source 1..19: mol_type = other RNA
ccgaagatgacaaaggcag

SEQ ID NO: 213 - RNA, 19 nt, synthetic construct
  source 1..19: mol_type = other RNA
ttttagctgcagtagggcc

SEQ ID NO: 214 - RNA, 19 nt, synthetic construct
  source 1..19: mol_type = other RNA
ctatcttcagggtcatctg

SEQ ID NO: 215 - RNA, 19 nt, synthetic construct
  source 1..19: mol_type = other RNA
aaatatattcatgagcttc

SEQ ID NO: 216 - RNA, 19 nt, synthetic construct
  source 1..19: mol_type = other RNA
gaacaaaggccgtgagggc

SEQ ID NO: 217 - RNA, 19 nt, synthetic construct
  source 1..19: mol_type = other RNA
tagttggcttcaaggaagt

SEQ ID NO: 218 - RNA, 19 nt, synthetic construct
  source 1..19: mol_type = other RNA
tttagctgcagtagggcca

SEQ ID NO: 219 - RNA, 19 nt, synthetic construct
  source 1..19: mol_type = other RNA
gagtgtgagaccttgtcca

SEQ ID NO: 220 - RNA, 19 nt, synthetic construct
  source 1..19: mol_type = other RNA
aggaacctggcggtgatgg

SEQ ID NO: 221 - RNA, 19 nt, synthetic construct
  source 1..19: mol_type = other RNA
cattcgtcctcctcgggcc

SEQ ID NO: 222 - RNA, 19 nt, synthetic construct
  source 1..19: mol_type = other RNA
gggcattcctggtttgaag

SEQ ID NO: 223 - RNA, 19 nt, synthetic construct
  source 1..19: mol_type = other RNA
gcccacggtgctgtagggc

SEQ ID NO: 224 - RNA, 19 nt, synthetic construct
  source 1..19: mol_type = other RNA
tcagactcggtgtccggga

SEQ ID NO: 225 - RNA, 19 nt, synthetic construct
  source 1..19: mol_type = other RNA
gtccactcctggctcacag

SEQ ID NO: 226 - RNA, 19 nt, synthetic construct
  source 1..19: mol_type = other RNA
atgaagtcggtggtgatgg

SEQ ID NO: 227 - RNA, 19 nt, synthetic construct
  source 1..19: mol_type = other RNA
gcagttccctccactttct

SEQ ID NO: 228 - RNA, 19 nt, synthetic construct
  source 1..19: mol_type = other RNA
cttgagctcttggttctgc

SEQ ID NO: 229 - RNA, 19 nt, synthetic construct
  source 1..19: mol_type = other RNA
cagctttccatcctccttt

SEQ ID NO: 230 - RNA, 19 nt, synthetic construct
  source 1..19: mol_type = other RNA
tgcagcgagatgagaacaa

SEQ ID NO: 231 - RNA, 19 nt, synthetic construct
  source 1..19: mol_type = other RNA
cttcagggtcatctgctgc

SEQ ID NO: 232 - RNA, 19 nt, synthetic construct
  source 1..19: mol_type = other RNA
ccgacaaggtgccttggcc

SEQ ID NO: 233 - RNA, 19 nt, synthetic construct
  source 1..19: mol_type = other RNA
ttctgccggtaattgtaga

SEQ ID NO: 234 - RNA, 19 nt, synthetic construct
  source 1..19: mol_type = other RNA
cagactcggtgtccgggac

SEQ ID NO: 235 - RNA, 19 nt, synthetic construct
  source 1..19: mol_type = other RNA
ggccatgtctttctcgttg

SEQ ID NO: 236 - RNA, 19 nt, synthetic construct
  source 1..19: mol_type = other RNA
tggaacaccatgaaggtgg

SEQ ID NO: 237 - RNA, 19 nt, synthetic construct
  source 1..19: mol_type = other RNA
taggcgtagaccttgactg

SEQ ID NO: 238 - RNA, 19 nt, synthetic construct
  source 1..19: mol_type = other RNA
gttactcctggccaggccc

SEQ ID NO: 239 - RNA, 19 nt, synthetic construct
  source 1..19: mol_type = other RNA
gtaggatctctgtaggttc

SEQ ID NO: 240 - RNA, 19 nt, synthetic construct
  source 1..19: mol_type = other RNA
tgcaggtaattgttggagt

SEQ ID NO: 241 - RNA, 19 nt, synthetic construct
  source 1..19: mol_type = other RNA
tgtgaaaccctcattttcc

SEQ ID NO: 242 - RNA, 19 nt, synthetic construct
  source 1..19: mol_type = other RNA
tgtagttggcttcaaggaa

SEQ ID NO: 243 - RNA, 19 nt, synthetic construct
  source 1..19: mol_type = other RNA
agagtagggtagccgcagg

SEQ ID NO: 244 - RNA, 19 nt, synthetic construct
  source 1..19: mol_type = other RNA
atcatagtgttcttggcat

SEQ ID NO: 245 - RNA, 19 nt, synthetic construct
  source 1..19: mol_type = other RNA
ggaggctggcagattccca

SEQ ID NO: 246 - RNA, 19 nt, synthetic construct
  source 1..19: mol_type = other RNA
ctcaaggatcatagtgttc

SEQ ID NO: 247 - RNA, 19 nt, synthetic construct
  source 1..19: mol_type = other RNA
atggccatgatgtactcgt

SEQ ID NO: 248 - RNA, 19 nt, synthetic construct
  source 1..19: mol_type = other RNA
gcagagcttgttcagcttt

SEQ ID NO: 249 - RNA, 19 nt, synthetic construct
  source 1..19: mol_type = other RNA
tgcaccatgtcactgcctg

SEQ ID NO: 250 - RNA, 19 nt, synthetic construct
  source 1..19: mol_type = other RNA
cagtcatcatggatatgtc

SEQ ID NO: 251 - RNA, 14 nt, synthetic construct
  source 1..14: mol_type = other RNA
aagatccgagccta

SEQ ID NO: 252 - RNA, 14 nt, synthetic construct
  source 1..14: mol_type = other RNA
aaggtcttctctct

SEQ ID NO: 253 - RNA, 14 nt, synthetic construct
  source 1..14: mol_type = other RNA
agggatctgtgtgg

SEQ ID NO: 254 - RNA, 14 nt, synthetic construct
  source 1..14: mol_type = other RNA
aagaccatctacac

SEQ ID NO: 255 - RNA, 14 nt, synthetic construct
  source 1..14: mol_type = other RNA
aggtcttctctctg

SEQ ID NO: 256 - RNA, 14 nt, synthetic construct
  source 1..14: mol_type = other RNA
aagggatctgtgtg

SEQ ID NO: 257 - RNA, 14 nt, synthetic construct
  source 1..14: mol_type = other RNA
ctcatggtgttcgt

SEQ ID NO: 258 - RNA, 14 nt, synthetic construct
  source 1..14: mol_type = other RNA
ttgacctcatggtg

SEQ ID NO: 259 - RNA, 14 nt, synthetic construct
  source 1..14: mol_type = other RNA
gtggtcaaggtctt

SEQ ID NO: 260 - RNA, 14 nt, synthetic construct
  source 1..14: mol_type = other RNA
tgacctcatggtgt

SEQ ID NO: 261 - RNA, 14 nt, synthetic construct
  source 1..14: mol_type = other RNA
acctcatggtgttc

SEQ ID NO: 262 - RNA, 14 nt, synthetic construct
  source 1..14: mol_type = other RNA
tggtcaaggtcttc

SEQ ID NO: 263 - RNA, 14 nt, synthetic construct
  source 1..14: mol_type = other RNA
gtcaaggtcttctc

SEQ ID NO: 264 - RNA, 14 nt, synthetic construct
  source 1..14: mol_type = other RNA
tgtgtacaagaccc

SEQ ID NO: 265 - RNA, 14 nt, synthetic construct
  source 1..14: mol_type = other RNA
tttgacctcatggt

SEQ ID NO: 266 - RNA, 14 nt, synthetic construct
  source 1..14: mol_type = other RNA
ctttgacctcatgg

SEQ ID NO: 267 - RNA, 14 nt, synthetic construct
  source 1..14: mol_type = other RNA
accagaattctcct

SEQ ID NO: 268 - RNA, 14 nt, synthetic construct
  source 1..14: mol_type = other RNA
ttggctcaatacca

SEQ ID NO: 269 - RNA, 14 nt, synthetic construct
  source 1..14: mol_type = other RNA
ttctctctggctgt

SEQ ID NO: 270 - RNA, 14 nt, synthetic construct
  source 1..14: mol_type = other RNA
gctgcccagtttcg

SEQ ID NO: 271 - RNA, 14 nt, synthetic construct
  source 1..14: mol_type = other RNA
cctacagagaaatt

SEQ ID NO: 272 - RNA, 14 nt, synthetic construct
  source 1..14: mol_type = other RNA
aaaggccaaggcac

SEQ ID NO: 273 - RNA, 14 nt, synthetic construct
  source 1..14: mol_type = other RNA
ggtcttctctctgg

SEQ ID NO: 274 - RNA, 14 nt, synthetic construct
  source 1..14: mol_type = other RNA
ctacagagaaattc

SEQ ID NO: 275 - RNA, 14 nt, synthetic construct
  source 1..14: mol_type = other RNA
gcctacagagaaat

SEQ ID NO: 276 - RNA, 14 nt, synthetic construct
  source 1..14: mol_type = other RNA
ggagcactggcccg

SEQ ID NO: 277 - RNA, 14 nt, synthetic construct
  source 1..14: mol_type = other RNA
atgccactatgtct

SEQ ID NO: 278 - RNA, 14 nt, synthetic construct
  source 1..14: mol_type = other RNA
aggaatcagaatga

SEQ ID NO: 279 - RNA, 14 nt, synthetic construct
  source 1..14: mol_type = other RNA
ttggctcaatgaac

SEQ ID NO: 280 - RNA, 14 nt, synthetic construct
  source 1..14: mol_type = other RNA
atcatctacctgga

SEQ ID NO: 281 - RNA, 14 nt, synthetic construct
  source 1..14: mol_type = other RNA
tgaggagaattgct

SEQ ID NO: 282 - RNA, 14 nt, synthetic construct
  source 1..14: mol_type = other RNA
agatccgagcctac

SEQ ID NO: 283 - RNA, 14 nt, synthetic construct
  source 1..14: mol_type = other RNA
agtacatcatggcc

SEQ ID NO: 284 - RNA, 14 nt, synthetic construct
  source 1..14: mol_type = other RNA
gtccaatgactttg

SEQ ID NO: 285 - RNA, 14 nt, synthetic construct
  source 1..14: mol_type = other RNA
atctccaagtatga

SEQ ID NO: 286 - RNA, 14 nt, synthetic construct
  source 1..14: mol_type = other RNA
agatacatctccaa

SEQ ID NO: 287 - RNA, 14 nt, synthetic construct
  source 1..14: mol_type = other RNA
aagactccatcacc

SEQ ID NO: 288 - RNA, 14 nt, synthetic construct
  source 1..14: mol_type = other RNA
atcctacactgtgg

SEQ ID NO: 289 - RNA, 14 nt, synthetic construct
  source 1..14: mol_type = other RNA
ttcacagtcacagc

SEQ ID NO: 290 - RNA, 14 nt, synthetic construct
  source 1..14: mol_type = other RNA
gtgggagattctgg

SEQ ID NO: 291 - RNA, 14 nt, synthetic construct
  source 1..14: mol_type = other RNA
atcactaaagcagg

SEQ ID NO: 292 - RNA, 14 nt, synthetic construct
  source 1..14: mol_type = other RNA
aggaacaccctcat

SEQ ID NO: 293 - RNA, 14 nt, synthetic construct
  source 1..14: mol_type = other RNA
aatgtaccatgcta

SEQ ID NO: 294 - RNA, 14 nt, synthetic construct
  source 1..14: mol_type = other RNA
taggaacaccctca

SEQ ID NO: 295 - RNA, 14 nt, synthetic construct
  source 1..14: mol_type = other RNA
agagaaattctact

SEQ ID NO: 296 - RNA, 14 nt, synthetic construct
  source 1..14: mol_type = other RNA
ttcaaagttcacca

SEQ ID NO: 297 - RNA, 14 nt, synthetic construct
  source 1..14: mol_type = other RNA
ctcgtcaacatggg

SEQ ID NO: 298 - RNA, 14 nt, synthetic construct
  source 1..14: mol_type = other RNA
aattacctgcatct

SEQ ID NO: 299 - RNA, 14 nt, synthetic construct
  source 1..14: mol_type = other RNA
ctgtaccaggtacc

SEQ ID NO: 300 - RNA, 14 nt, synthetic construct
  source 1..14: mol_type = other RNA
actccaacaattac

SEQ ID NO: 301 - RNA, 14 nt, synthetic construct
  source 1..14: mol_type = other RNA
aactccaacaatta

SEQ ID NO: 302 - RNA, 14 nt, synthetic construct
  source 1..14: mol_type = other RNA
atccaggatggcga

SEQ ID NO: 303 - RNA, 14 nt, synthetic construct
  source 1..14: mol_type = other RNA
tacagagaaattct

SEQ ID NO: 304 - RNA, 14 nt, synthetic construct
  source 1..14: mol_type = other RNA
ctaaaagactttga

SEQ ID NO: 305 - RNA, 14 nt, synthetic construct
  source 1..14: mol_type = other RNA
attccggaactcgt

SEQ ID NO: 306 - RNA, 14 nt, synthetic construct
  source 1..14: mol_type = other RNA
aggagaattgcttc

SEQ ID NO: 307 - RNA, 14 nt, synthetic construct
  source 1..14: mol_type = other RNA
agagaacatcgttt

SEQ ID NO: 308 - RNA, 14 nt, synthetic construct
  source 1..14: mol_type = other RNA
atcttcgggatcca

SEQ ID NO: 309 - RNA, 14 nt, synthetic construct
  source 1..14: mol_type = other RNA
ctgaacaagctctg

SEQ ID NO: 310 - RNA, 14 nt, synthetic construct
  source 1..14: mol_type = other RNA
gccactatgtctat

SEQ ID NO: 311 - RNA, 14 nt, synthetic construct
  source 1..14: mol_type = other RNA
tccaacaattacct

SEQ ID NO: 312 - RNA, 14 nt, synthetic construct
  source 1..14: mol_type = other RNA
cggaaggaatcaga

SEQ ID NO: 313 - RNA, 14 nt, synthetic construct
  source 1..14: mol_type = other RNA
aaatgagggtttca

SEQ ID NO: 314 - RNA, 14 nt, synthetic construct
  source 1..14: mol_type = other RNA
agaacactatgatc

SEQ ID NO: 315 - RNA, 14 nt, synthetic construct
  source 1..14: mol_type = other RNA
ataaaaccagcacc

SEQ ID NO: 316 - RNA, 14 nt, synthetic construct
  source 1..14: mol_type = other RNA
aggaatgccctttg

SEQ ID NO: 317 - RNA, 14 nt, synthetic construct
  source 1..14: mol_type = other RNA
aggagtaacctgga

SEQ ID NO: 318 - RNA, 14 nt, synthetic construct
  source 1..14: mol_type = other RNA
agctaaaagacttt

SEQ ID NO: 319 - RNA, 14 nt, synthetic construct
  source 1..14: mol_type = other RNA
ttcagacaacccag

SEQ ID NO: 320 - RNA, 14 nt, synthetic construct
  source 1..14: mol_type = other RNA
aagtatgagctgga

SEQ ID NO: 321 - RNA, 14 nt, synthetic construct
  source 1..14: mol_type = other RNA
aatgcaggacttct

SEQ ID NO: 322 - RNA, 14 nt, synthetic construct
  source 1..14: mol_type = other RNA
agagtaagatctgg

SEQ ID NO: 323 - RNA, 14 nt, synthetic construct
  source 1..14: mol_type = other RNA
gaagcagaagcccg

SEQ ID NO: 324 - RNA, 14 nt, synthetic construct
  source 1..14: mol_type = other RNA
accataaaaccagc

SEQ ID NO: 325 - RNA, 14 nt, synthetic construct
  source 1..14: mol_type = other RNA
gtctttgggtgccc

SEQ ID NO: 326 - RNA, 14 nt, synthetic construct
  source 1..14: mol_type = other RNA
agaaccaagagctc

SEQ ID NO: 327 - RNA, 14 nt, synthetic construct
  source 1..14: mol_type = other RNA
aacgtcaacttcct

SEQ ID NO: 328 - RNA, 14 nt, synthetic construct
  source 1..14: mol_type = other RNA
aacccagctctgcc

SEQ ID NO: 329 - RNA, 14 nt, synthetic construct
  source 1..14: mol_type = other RNA
aggagtggactatg

SEQ ID NO: 330 - RNA, 14 nt, synthetic construct
  source 1..14: mol_type = other RNA
gtaataaattcgac

SEQ ID NO: 331 - RNA, 14 nt, synthetic construct
  source 1..14: mol_type = other RNA
acagagaaattcta

SEQ ID NO: 332 - RNA, 14 nt, synthetic construct
  source 1..14: mol_type = other RNA
tgccaagaacacta

SEQ ID NO: 333 - RNA, 14 nt, synthetic construct
  source 1..14: mol_type = other RNA
agaacatcgtttcc

SEQ ID NO: 334 - RNA, 14 nt, synthetic construct
  source 1..14: mol_type = other RNA
atccgagcctacta

SEQ ID NO: 335 - RNA, 14 nt, synthetic construct
  source 1..14: mol_type = other RNA
tgtgctgaggagaa

SEQ ID NO: 336 - RNA, 14 nt, synthetic construct
  source 1..14: mol_type = other RNA
atcacggtgcgcac

SEQ ID NO: 337 - RNA, 14 nt, synthetic construct
  source 1..14: mol_type = other RNA
tttgacgagtacat

SEQ ID NO: 338 - RNA, 14 nt, synthetic construct
  source 1..14: mol_type = other RNA
atggccctcacggc

SEQ ID NO: 339 - RNA, 14 nt, synthetic construct
  source 1..14: mol_type = other RNA
aacattgagaaccc

SEQ ID NO: 340 - RNA, 14 nt, synthetic construct
  source 1..14: mol_type = other RNA
gtgacggtgtcagg

SEQ ID NO: 341 - RNA, 14 nt, synthetic construct
  source 1..14: mol_type = other RNA
gtttcgaggtcata

SEQ ID NO: 342 - RNA, 14 nt, synthetic construct
  source 1..14: mol_type = other RNA
aaattcgacctcaa

SEQ ID NO: 343 - RNA, 14 nt, synthetic construct
  source 1..14: mol_type = other RNA
caaggaaaatgagg

SEQ ID NO: 344 - RNA, 14 nt, synthetic construct
  source 1..14: mol_type = other RNA
ttcatacaaaagtc

SEQ ID NO: 345 - RNA, 14 nt, synthetic construct
  source 1..14: mol_type = other RNA
aggtctcacactct

SEQ ID NO: 346 - RNA, 14 nt, synthetic construct
  source 1..14: mol_type = other RNA
tgtaataaattcga

SEQ ID NO: 347 - RNA, 14 nt, synthetic construct
  source 1..14: mol_type = other RNA
gaggtgcaggttgg

SEQ ID NO: 348 - RNA, 14 nt, synthetic construct
  source 1..14: mol_type = other RNA
gtctcacactctga

SEQ ID NO: 349 - RNA, 14 nt, synthetic construct
  source 1..14: mol_type = other RNA
aatgaacagagata

SEQ ID NO: 350 - RNA, 14 nt, synthetic construct
  source 1..14: mol_type = other RNA
atgcaggacttctt

SEQ ID NO: 351 - RNA, 14 nt, synthetic construct
  source 1..14: mol_type = other RNA
ccttgagatctgta

SEQ ID NO: 352 - RNA, 14 nt, synthetic construct
  source 1..14: mol_type = other RNA
agtggaagatccga

SEQ ID NO: 353 - RNA, 14 nt, synthetic construct
  source 1..14: mol_type = other RNA
aagcaggagacttc

SEQ ID NO: 354 - RNA, 14 nt, synthetic construct
  source 1..14: mol_type = other RNA
gaggagaattgctt

SEQ ID NO: 355 - RNA, 14 nt, synthetic construct
  source 1..14: mol_type = other RNA
ctgtaataaattcg

SEQ ID NO: 356 - RNA, 14 nt, synthetic construct
  source 1..14: mol_type = other RNA
ttatccagcctgga

SEQ ID NO: 357 - RNA, 14 nt, synthetic construct
  source 1..14: mol_type = other RNA
aagatccgctacta

SEQ ID NO: 358 - RNA, 14 nt, synthetic construct
  source 1..14: mol_type = other RNA
tattacaacctgga

SEQ ID NO: 359 - RNA, 14 nt, synthetic construct
  source 1..14: mol_type = other RNA
atatccatgatgac

SEQ ID NO: 360 - RNA, 14 nt, synthetic construct
  source 1..14: mol_type = other RNA
aaagttcaccaata

SEQ ID NO: 361 - RNA, 14 nt, synthetic construct
  source 1..14: mol_type = other RNA
taccctactctgtt

SEQ ID NO: 362 - RNA, 14 nt, synthetic construct
  source 1..14: mol_type = other RNA
aggatgccactatg

SEQ ID NO: 363 - RNA, 14 nt, synthetic construct
  source 1..14: mol_type = other RNA
acagccaaagataa

SEQ ID NO: 364 - RNA, 14 nt, synthetic construct
  source 1..14: mol_type = other RNA
acatcctatgccct

SEQ ID NO: 365 - RNA, 14 nt, synthetic construct
  source 1..14: mol_type = other RNA
aacagaaaagaggc

SEQ ID NO: 366 - RNA, 14 nt, synthetic construct
  source 1..14: mol_type = other RNA
agcctcctgcgatc

SEQ ID NO: 367 - RNA, 14 nt, synthetic construct
  source 1..14: mol_type = other RNA
ggagtggactatgt

SEQ ID NO: 368 - RNA, 14 nt, synthetic construct
  source 1..14: mol_type = other RNA
gagtaagatctggg

SEQ ID NO: 369 - RNA, 14 nt, synthetic construct
  source 1..14: mol_type = other RNA
aaaatgagggtttc

SEQ ID NO: 370 - RNA, 14 nt, synthetic construct
  source 1..14: mol_type = other RNA
attaccggcagaac

SEQ ID NO: 371 - RNA, 14 nt, synthetic construct
  source 1..14: mol_type = other RNA
ctctgaggatgact

SEQ ID NO: 372 - RNA, 14 nt, synthetic construct
  source 1..14: mol_type = other RNA
gtcaggaagtccct

SEQ ID NO: 373 - RNA, 14 nt, synthetic construct
  source 1..14: mol_type = other RNA
gtgaaggagtacgt

SEQ ID NO: 374 - RNA, 14 nt, synthetic construct
  source 1..14: mol_type = other RNA
agaccagaattctc

SEQ ID NO: 375 - RNA, 14 nt, synthetic construct
  source 1..14: mol_type = other RNA
accttcatggtgtt

SEQ ID NO: 376 - RNA, 14 nt, synthetic construct
  source 1..14: mol_type = other RNA
gttccaagccttgg

SEQ ID NO: 377 - RNA, 14 nt, synthetic construct
  source 1..14: mol_type = other RNA
cacagccaaagata

SEQ ID NO: 378 - RNA, 14 nt, synthetic construct
  source 1..14: mol_type = other RNA
ctgctgcaactaca

SEQ ID NO: 379 - RNA, 14 nt, synthetic construct
  source 1..14: mol_type = other RNA
gtgctgcccagttt

SEQ ID NO: 380 - RNA, 14 nt, synthetic construct
  source 1..14: mol_type = other RNA
acagagatactacg

SEQ ID NO: 381 - RNA, 14 nt, synthetic construct
  source 1..14: mol_type = other RNA
atagtggagcctac

SEQ ID NO: 382 - RNA, 14 nt, synthetic construct
  source 1..14: mol_type = other RNA
actacacctacctg

SEQ ID NO: 383 - RNA, 14 nt, synthetic construct
  source 1..14: mol_type = other RNA
ctcacggcctttgt

SEQ ID NO: 384 - RNA, 14 nt, synthetic construct
  source 1..14: mol_type = other RNA
tgtacccggttcta

SEQ ID NO: 385 - RNA, 14 nt, synthetic construct
  source 1..14: mol_type = other RNA
cacatcctatgccc

SEQ ID NO: 386 - RNA, 14 nt, synthetic construct
  source 1..14: mol_type = other RNA
agactccatcacca

SEQ ID NO: 387 - RNA, 14 nt, synthetic construct
  source 1..14: mol_type = other RNA
agtttcgaggtcat

SEQ ID NO: 388 - RNA, 14 nt, synthetic construct
  source 1..14: mol_type = other RNA
gaaaatgagggttt

SEQ ID NO: 389 - RNA, 14 nt, synthetic construct
  source 1..14: mol_type = other RNA
atcatggccattga

SEQ ID NO: 390 - RNA, 14 nt, synthetic construct
  source 1..14: mol_type = other RNA
aatgactttgacga

SEQ ID NO: 391 - RNA, 14 nt, synthetic construct
  source 1..14: mol_type = other RNA
agctcaaggtgagg

SEQ ID NO: 392 - RNA, 14 nt, synthetic construct
  source 1..14: mol_type = other RNA
atggctgatcctgg

SEQ ID NO: 393 - RNA, 14 nt, synthetic construct
  source 1..14: mol_type = other RNA
gagaacatcgtttc

SEQ ID NO: 394 - RNA, 14 nt, synthetic construct
  source 1..14: mol_type = other RNA
cacgacttcccagg

SEQ ID NO: 395 - RNA, 14 nt, synthetic construct
  source 1..14: mol_type = other RNA
ggacaaagccttct

SEQ ID NO: 396 - RNA, 14 nt, synthetic construct
  source 1..14: mol_type = other RNA
agtgacggtgtcag

SEQ ID NO: 397 - RNA, 14 nt, synthetic construct
  source 1..14: mol_type = other RNA
attacctgcatctc

SEQ ID NO: 398 - RNA, 14 nt, synthetic construct
  source 1..14: mol_type = other RNA
aactgcctttgtca

SEQ ID NO: 399 - RNA, 14 nt, synthetic construct
  source 1..14: mol_type = other RNA
taaaagactttgac

SEQ ID NO: 400 - RNA, 14 nt, synthetic construct
  source 1..14: mol_type = other RNA
acgtgggagattct

SEQ ID NO: 401 - RNA, 14 nt, synthetic construct
  source 1..14: mol_type = other RNA
aagacccgactggt

SEQ ID NO: 402 - RNA, 14 nt, synthetic construct
  source 1..14: mol_type = other RNA
ggatgccaagaaca

SEQ ID NO: 403 - RNA, 14 nt, synthetic construct
  source 1..14: mol_type = other RNA
agggtggaactact

SEQ ID NO: 404 - RNA, 14 nt, synthetic construct
  source 1..14: mol_type = other RNA
ctattacaacctgg

SEQ ID NO: 405 - RNA, 14 nt, synthetic construct
  source 1..14: mol_type = other RNA
aggaggatgcgccc

SEQ ID NO: 406 - RNA, 14 nt, synthetic construct
  source 1..14: mol_type = other RNA
gataagaaccgctg

SEQ ID NO: 407 - RNA, 14 nt, synthetic construct
  source 1..14: mol_type = other RNA
gtcacagtaatgca

SEQ ID NO: 408 - RNA, 14 nt, synthetic construct
  source 1..14: mol_type = other RNA
cactgagtttgagg

SEQ ID NO: 409 - RNA, 14 nt, synthetic construct
  source 1..14: mol_type = other RNA
acaaagccttctcc

SEQ ID NO: 410 - RNA, 14 nt, synthetic construct
  source 1..14: mol_type = other RNA
acctcttcatccag

SEQ ID NO: 411 - RNA, 14 nt, synthetic construct
  source 1..14: mol_type = other RNA
tactccacaatcca

SEQ ID NO: 412 - RNA, 14 nt, synthetic construct
  source 1..14: mol_type = other RNA
agtaacctggatga

SEQ ID NO: 413 - RNA, 14 nt, synthetic construct
  source 1..14: mol_type = other RNA
aggtgagggtggaa

SEQ ID NO: 414 - RNA, 14 nt, synthetic construct
  source 1..14: mol_type = other RNA
ttccttgaagccaa

SEQ ID NO: 415 - RNA, 14 nt, synthetic construct
  source 1..14: mol_type = other RNA
gacaaagccttctc

SEQ ID NO: 416 - RNA, 14 nt, synthetic construct
  source 1..14: mol_type = other RNA
taaaaccagcaccg

SEQ ID NO: 417 - RNA, 14 nt, synthetic construct
  source 1..14: mol_type = other RNA
actacggtggtggc

SEQ ID NO: 418 - RNA, 14 nt, synthetic construct
  source 1..14: mol_type = other RNA
aggcctgtgagcca

SEQ ID NO: 419 - RNA, 14 nt, synthetic construct
  source 1..14: mol_type = other RNA
cttgagatctgtac

SEQ ID NO: 420 - RNA, 14 nt, synthetic construct
  source 1..14: mol_type = other RNA
atgaacctacagag

SEQ ID NO: 421 - RNA, 14 nt, synthetic construct
  source 1..14: mol_type = other RNA
gaacaaaactgtgg

SEQ ID NO: 422 - RNA, 14 nt, synthetic construct
  source 1..14: mol_type = other RNA
ttccaagccttggc

SEQ ID NO: 423 - RNA, 14 nt, synthetic construct
  source 1..14: mol_type = other RNA
gtgggcaactccaa

SEQ ID NO: 424 - RNA, 14 nt, synthetic construct
  source 1..14: mol_type = other RNA
gcctcctgcgatca

SEQ ID NO: 425 - RNA, 14 nt, synthetic construct
  source 1..14: mol_type = other RNA
cgtgggagattctg

SEQ ID NO: 426 - RNA, 14 nt, synthetic construct
  source 1..14: mol_type = other RNA
actcgtcaacatgg

SEQ ID NO: 427 - RNA, 14 nt, synthetic construct
  source 1..14: mol_type = other RNA
ctcatgaatatatt

SEQ ID NO: 428 - RNA, 14 nt, synthetic construct
  source 1..14: mol_type = other RNA
agctgaacaagctc

SEQ ID NO: 429 - RNA, 14 nt, synthetic construct
  source 1..14: mol_type = other RNA
atgaggacatcatt

SEQ ID NO: 430 - RNA, 14 nt, synthetic construct
  source 1..14: mol_type = other RNA
attgcttcatacaa

SEQ ID NO: 431 - RNA, 14 nt, synthetic construct
  source 1..14: mol_type = other RNA
agaagagaccaagg

SEQ ID NO: 432 - RNA, 14 nt, synthetic construct
  source 1..14: mol_type = other RNA
ggtcaccatcaccg

SEQ ID NO: 433 - RNA, 14 nt, synthetic construct
  source 1..14: mol_type = other RNA
gtagagcttatcca

SEQ ID NO: 434 - RNA, 14 nt, synthetic construct
  source 1..14: mol_type = other RNA
tcggatgaggtgca

SEQ ID NO: 435 - RNA, 14 nt, synthetic construct
  source 1..14: mol_type = other RNA
gggaaggattacgc

SEQ ID NO: 436 - RNA, 14 nt, synthetic construct
  source 1..14: mol_type = other RNA
gtcgtgcgttggct

SEQ ID NO: 437 - RNA, 14 nt, synthetic construct
  source 1..14: mol_type = other RNA
actatgatccttga

SEQ ID NO: 438 - RNA, 14 nt, synthetic construct
  source 1..14: mol_type = other RNA
cagtttcgaggtca

SEQ ID NO: 439 - RNA, 14 nt, synthetic construct
  source 1..14: mol_type = other RNA
ctgggacgtggtgg

SEQ ID NO: 440 - RNA, 14 nt, synthetic construct
  source 1..14: mol_type = other RNA
aactcagcatcaac

SEQ ID NO: 441 - RNA, 14 nt, synthetic construct
  source 1..14: mol_type = other RNA
atgaacaaaactgt

SEQ ID NO: 442 - RNA, 14 nt, synthetic construct
  source 1..14: mol_type = other RNA
actccacaatccag

SEQ ID NO: 443 - RNA, 14 nt, synthetic construct
  source 1..14: mol_type = other RNA
aggagacttccttg

SEQ ID NO: 444 - RNA, 14 nt, synthetic construct
  source 1..14: mol_type = other RNA
atcagaagagacca

SEQ ID NO: 445 - RNA, 14 nt, synthetic construct
  source 1..14: mol_type = other RNA
catagtggagccta

SEQ ID NO: 446 - RNA, 14 nt, synthetic construct
  source 1..14: mol_type = other RNA
gtctctaacccagg

SEQ ID NO: 447 - RNA, 14 nt, synthetic construct
  source 1..14: mol_type = other RNA
tggacaaggtctca

SEQ ID NO: 448 - RNA, 14 nt, synthetic construct
  source 1..14: mol_type = other RNA
aataccaaaaggac

SEQ ID NO: 449 - RNA, 14 nt, synthetic construct
  source 1..14: mol_type = other RNA
agataagaaccgct

SEQ ID NO: 450 - RNA, 14 nt, synthetic construct
  source 1..14: mol_type = other RNA
tttgttctcatctc

SEQ ID NO: 451 - RNA, 14 nt, synthetic construct
  source 1..14: mol_type = other RNA
gagaaattctacta

SEQ ID NO: 452 - RNA, 14 nt, synthetic construct
  source 1..14: mol_type = other RNA
agcaggactccttg

SEQ ID NO: 453 - RNA, 14 nt, synthetic construct
  source 1..14: mol_type = other RNA
gaaggagtacgtgc

SEQ ID NO: 454 - RNA, 14 nt, synthetic construct
  source 1..14: mol_type = other RNA
agtggaagtcaagg

SEQ ID NO: 455 - RNA, 14 nt, synthetic construct
  source 1..14: mol_type = other RNA
tgccactatgtcta

SEQ ID NO: 456 - RNA, 14 nt, synthetic construct
  source 1..14: mol_type = other RNA
aaaagactttgact

SEQ ID NO: 457 - RNA, 14 nt, synthetic construct
  source 1..14: mol_type = other RNA
ctgcctgaatccct

SEQ ID NO: 458 - RNA, 14 nt, synthetic construct
  source 1..14: mol_type = other RNA
caagaacactatga

SEQ ID NO: 459 - RNA, 14 nt, synthetic construct
  source 1..14: mol_type = other RNA
ggagtacgtgctgc

SEQ ID NO: 460 - RNA, 14 nt, synthetic construct
  source 1..14: mol_type = other RNA
atttctgaccacag

SEQ ID NO: 461 - RNA, 14 nt, synthetic construct
  source 1..14: mol_type = other RNA
gctaccctactctg

SEQ ID NO: 462 - RNA, 14 nt, synthetic construct
  source 1..14: mol_type = other RNA
tttgtcatcttcgg

SEQ ID NO: 463 - RNA, 14 nt, synthetic construct
  source 1..14: mol_type = other RNA
tactgcagctaaaa

SEQ ID NO: 464 - RNA, 14 nt, synthetic construct
  source 1..14: mol_type = other RNA
gaccctgaagatag

SEQ ID NO: 465 - RNA, 14 nt, synthetic construct
  source 1..14: mol_type = other RNA
tcatgaatatattt

SEQ ID NO: 466 - RNA, 14 nt, synthetic construct
  source 1..14: mol_type = other RNA
cacggcctttgttc

SEQ ID NO: 467 - RNA, 14 nt, synthetic construct
  source 1..14: mol_type = other RNA
cttgaagccaacta

SEQ ID NO: 468 - RNA, 14 nt, synthetic construct
  source 1..14: mol_type = other RNA
ctactgcagctaaa

SEQ ID NO: 469 - RNA, 14 nt, synthetic construct
  source 1..14: mol_type = other RNA
aaggtctcacactc

SEQ ID NO: 470 - RNA, 14 nt, synthetic construct
  source 1..14: mol_type = other RNA
accgccaggttcct

SEQ ID NO: 471 - RNA, 14 nt, synthetic construct
  source 1..14: mol_type = other RNA
gaggaggacgaatg

SEQ ID NO: 472 - RNA, 14 nt, synthetic construct
  source 1..14: mol_type = other RNA
aaccaggaatgccc

SEQ ID NO: 473 - RNA, 14 nt, synthetic construct
  source 1..14: mol_type = other RNA
acagcaccgtgggc

SEQ ID NO: 474 - RNA, 14 nt, synthetic construct
  source 1..14: mol_type = other RNA
gacaccgagtctga

SEQ ID NO: 475 - RNA, 14 nt, synthetic construct
  source 1..14: mol_type = other RNA
agccaggagtggac

SEQ ID NO: 476 - RNA, 14 nt, synthetic construct
  source 1..14: mol_type = other RNA
accaccgacttcat

SEQ ID NO: 477 - RNA, 14 nt, synthetic construct
  source 1..14: mol_type = other RNA
gtggagggaactgc

SEQ ID NO: 478 - RNA, 14 nt, synthetic construct
  source 1..14: mol_type = other RNA
accaagagctcaag

SEQ ID NO: 479 - RNA, 14 nt, synthetic construct
  source 1..14: mol_type = other RNA
aggatggaaagctg

SEQ ID NO: 480 - RNA, 14 nt, synthetic construct
  source 1..14: mol_type = other RNA
ctcatctcgctgca

SEQ ID NO: 481 - RNA, 14 nt, synthetic construct
  source 1..14: mol_type = other RNA
agatgaccctgaag

SEQ ID NO: 482 - RNA, 14 nt, synthetic construct
  source 1..14: mol_type = other RNA
aggcaccttgtcgg

SEQ ID NO: 483 - RNA, 14 nt, synthetic construct
  source 1..14: mol_type = other RNA
aattaccggcagaa

SEQ ID NO: 484 - RNA, 14 nt, synthetic construct
  source 1..14: mol_type = other RNA
ggacaccgagtctg

SEQ ID NO: 485 - RNA, 14 nt, synthetic construct
  source 1..14: mol_type = other RNA
agaaagacatggcc

SEQ ID NO: 486 - RNA, 14 nt, synthetic construct
  source 1..14: mol_type = other RNA
ttcatggtgttcca

SEQ ID NO: 487 - RNA, 14 nt, synthetic construct
  source 1..14: mol_type = other RNA
aaggtctacgccta

SEQ ID NO: 488 - RNA, 14 nt, synthetic construct
  source 1..14: mol_type = other RNA
tggccaggagtaac

SEQ ID NO: 489 - RNA, 14 nt, synthetic construct
  source 1..14: mol_type = other RNA
tacagagatcctac

SEQ ID NO: 490 - RNA, 14 nt, synthetic construct
  source 1..14: mol_type = other RNA
aacaattacctgca

SEQ ID NO: 491 - RNA, 14 nt, synthetic construct
  source 1..14: mol_type = other RNA
atgagggtttcaca

SEQ ID NO: 492 - RNA, 14 nt, synthetic construct
  source 1..14: mol_type = other RNA
tgaagccaactaca

SEQ ID NO: 493 - RNA, 14 nt, synthetic construct
  source 1..14: mol_type = other RNA
ggctaccctactct

SEQ ID NO: 494 - RNA, 14 nt, synthetic construct
  source 1..14: mol_type = other RNA
aagaacactatgat

SEQ ID NO: 495 - RNA, 14 nt, synthetic construct
  source 1..14: mol_type = other RNA
atctgccagcctcc

SEQ ID NO: 496 - RNA, 14 nt, synthetic construct
  source 1..14: mol_type = other RNA
ctatgatccttgag

SEQ ID NO: 497 - RNA, 14 nt, synthetic construct
  source 1..14: mol_type = other RNA
tacatcatggccat

SEQ ID NO: 498 - RNA, 14 nt, synthetic construct
  source 1..14: mol_type = other RNA
tgaacaagctctgc

SEQ ID NO: 499 - RNA, 14 nt, synthetic construct
  source 1..14: mol_type = other RNA
agtgacatggtgca

SEQ ID NO: 500 - RNA, 14 nt, synthetic construct
  source 1..14: mol_type = other RNA
atccatgatgactg

SEQ ID NO: 501 - RNA, 33 nt, synthetic construct
  source 1..33: mol_type = other RNA
taggctcggatcttccactaagatccgagccta

SEQ ID NO: 502 - RNA, 33 nt, synthetic construct
  source 1..33: mol_type = other RNA
agagagaagaccttgaccaaaggtcttctctct

SEQ ID NO: 503 - RNA, 33 nt, synthetic construct
  source 1..33: mol_type = other RNA
ccacacagatccctttcttagggatctgtgtgg

SEQ ID NO: 504 - RNA, 33 nt, synthetic construct
  source 1..33: mol_type = other RNA
gtgtagatggtcttgtctgaagaccatctacac

SEQ ID NO: 505 - RNA, 33 nt, synthetic construct
  source 1..33: mol_type = other RNA
cagagagaagaccttgaccaggtcttctctctg

SEQ ID NO: 506 - RNA, 33 nt, synthetic construct
  source 1..33: mol_type = other RNA
cacacagatccctttcttgaagggatctgtgtg

SEQ ID NO: 507 - RNA, 33 nt, synthetic construct
  source 1..33: mol_type = other RNA
acgaacaccatgaggtcaactcatggtgttcgt

SEQ ID NO: 508 - RNA, 33 nt, synthetic construct
  source 1..33: mol_type = other RNA
caccatgaggtcaaagggcttgacctcatggtg

SEQ ID NO: 509 - RNA, 33 nt, synthetic construct
  source 1..33: mol_type = other RNA
aagaccttgaccacgtagggtggtcaaggtctt

SEQ ID NO: 510 - RNA, 33 nt, synthetic construct
  source 1..33: mol_type = other RNA
acaccatgaggtcaaagggtgacctcatggtgt

SEQ ID NO: 511 - RNA, 33 nt, synthetic construct
  source 1..33: mol_type = other RNA
gaacaccatgaggtcaaagacctcatggtgttc

SEQ ID NO: 512 - RNA, 33 nt, synthetic construct
  source 1..33: mol_type = other RNA
gaagaccttgaccacgtagtggtcaaggtcttc

SEQ ID NO: 513 - RNA, 33 nt, synthetic construct
  source 1..33: mol_type = other RNA
gagaagaccttgaccacgtgtcaaggtcttctc

SEQ ID NO: 514 - RNA, 33 nt, synthetic construct
  source 1..33: mol_type = other RNA
gggtcttgtacacatagtctgtgtacaagaccc

SEQ ID NO: 515 - RNA, 33 nt, synthetic construct
  source 1..33: mol_type = other RNA
accatgaggtcaaagggcatttgacctcatggt

SEQ ID NO: 516 - RNA, 33 nt, synthetic construct
  source 1..33: mol_type = other RNA
ccatgaggtcaaagggcatctttgacctcatgg

SEQ ID NO: 517 - RNA, 33 nt, synthetic construct
  source 1..33: mol_type = other RNA
aggagaattctggtctcagaccagaattctcct

SEQ ID NO: 518 - RNA, 33 nt, synthetic construct
  source 1..33: mol_type = other RNA
tggtattgagccaaggcttttggctcaatacca

SEQ ID NO: 519 - RNA, 33 nt, synthetic construct
  source 1..33: mol_type = other RNA
acagccagagagaagacctttctctctggctgt

SEQ ID NO: 520 - RNA, 33 nt, synthetic construct
  source 1..33: mol_type = other RNA
cgaaactgggcagcacgtagctgcccagtttcg

SEQ ID NO: 521 - RNA, 33 nt, synthetic construct
  source 1..33: mol_type = other RNA
aatttctctgtaggctccacctacagagaaatt

SEQ ID NO: 522 - RNA, 33 nt, synthetic construct
  source 1..33: mol_type = other RNA
gtgccttggccttttccttaaaggccaaggcac

SEQ ID NO: 523 - RNA, 33 nt, synthetic construct
  source 1..33: mol_type = other RNA
ccagagagaagaccttgacggtcttctctctgg

SEQ ID NO: 524 - RNA, 33 nt, synthetic construct
  source 1..33: mol_type = other RNA
gaatttctctgtaggctccctacagagaaattc

SEQ ID NO: 525 - RNA, 33 nt, synthetic construct
  source 1..33: mol_type = other RNA
atttctctgtaggctccacgcctacagagaaat

SEQ ID NO: 526 - RNA, 33 nt, synthetic construct
  source 1..33: mol_type = other RNA
cgggccagtgctccacccaggagcactggcccg

SEQ ID NO: 527 - RNA, 33 nt, synthetic construct
  source 1..33: mol_type = other RNA
agacatagtggcatcctggatgccactatgtct

SEQ ID NO: 528 - RNA, 33 nt, synthetic construct
  source 1..33: mol_type = other RNA
tcattctgattccttccggaggaatcagaatga

SEQ ID NO: 529 - RNA, 33 nt, synthetic construct
  source 1..33: mol_type = other RNA
gttcattgagccaacgcacttggctcaatgaac

SEQ ID NO: 530 - RNA, 33 nt, synthetic construct
  source 1..33: mol_type = other RNA
tccaggtagatgatgagggatcatctacctgga

SEQ ID NO: 531 - RNA, 33 nt, synthetic construct
  source 1..33: mol_type = other RNA
agcaattctcctcagcacatgaggagaattgct

SEQ ID NO: 532 - RNA, 33 nt, synthetic construct
  source 1..33: mol_type = other RNA
gtaggctcggatcttccacagatccgagcctac

SEQ ID NO: 533 - RNA, 33 nt, synthetic construct
  source 1..33: mol_type = other RNA
ggccatgatgtactcgtcaagtacatcatggcc

SEQ ID NO: 534 - RNA, 33 nt, synthetic construct
  source 1..33: mol_type = other RNA
caaagtcattggacagctggtccaatgactttg

SEQ ID NO: 535 - RNA, 33 nt, synthetic construct
  source 1..33: mol_type = other RNA
tcatacttggagatgtatcatctccaagtatga

SEQ ID NO: 536 - RNA, 33 nt, synthetic construct
  source 1..33: mol_type = other RNA
ttggagatgtatctgtcaaagatacatctccaa

SEQ ID NO: 537 - RNA, 33 nt, synthetic construct
  source 1..33: mol_type = other RNA
ggtgatggagtctttcaaaaagactccatcacc

SEQ ID NO: 538 - RNA, 33 nt, synthetic construct
  source 1..33: mol_type = other RNA
ccacagtgtaggatctctgatcctacactgtgg

SEQ ID NO: 539 - RNA, 33 nt, synthetic construct
  source 1..33: mol_type = other RNA
gctgtgactgtgaaaccctttcacagtcacagc

SEQ ID NO: 540 - RNA, 33 nt, synthetic construct
  source 1..33: mol_type = other RNA
ccagaatctcccacgtggtgtgggagattctgg

SEQ ID NO: 541 - RNA, 33 nt, synthetic construct
  source 1..33: mol_type = other RNA
cctgctttagtgatgctgcatcactaaagcagg

SEQ ID NO: 542 - RNA, 33 nt, synthetic construct
  source 1..33: mol_type = other RNA
atgagggtgttcctatcggaggaacaccctcat

SEQ ID NO: 543 - RNA, 33 nt, synthetic construct
  source 1..33: mol_type = other RNA
tagcatggtacattgtcacaatgtaccatgcta

SEQ ID NO: 544 - RNA, 33 nt, synthetic construct
  source 1..33: mol_type = other RNA
tgagggtgttcctatcggataggaacaccctca

SEQ ID NO: 545 - RNA, 33 nt, synthetic construct
  source 1..33: mol_type = other RNA
agtagaatttctctgtaggagagaaattctact

SEQ ID NO: 546 - RNA, 33 nt, synthetic construct
  source 1..33: mol_type = other RNA
tggtgaactttgaaagctattcaaagttcacca

SEQ ID NO: 547 - RNA, 33 nt, synthetic construct
  source 1..33: mol_type = other RNA
cccatgttgacgagttccgctcgtcaacatggg

SEQ ID NO: 548 - RNA, 33 nt, synthetic construct
  source 1..33: mol_type = other RNA
agatgcaggtaattgttggaattacctgcatct

SEQ ID NO: 549 - RNA, 33 nt, synthetic construct
  source 1..33: mol_type = other RNA
ggtacctggtacagatctcctgtaccaggtacc

SEQ ID NO: 550 - RNA, 33 nt, synthetic construct
  source 1..33: mol_type = other RNA
gtaattgttggagttgcccactccaacaattac

SEQ ID NO: 551 - RNA, 33 nt, synthetic construct
  source 1..33: mol_type = other RNA
taattgttggagttgcccaaactccaacaatta

SEQ ID NO: 552 - RNA, 33 nt, synthetic construct
  source 1..33: mol_type = other RNA
tcgccatcctggatcccgaatccaggatggcga

SEQ ID NO: 553 - RNA, 33 nt, synthetic construct
  source 1..33: mol_type = other RNA
agaatttctctgtaggctctacagagaaattct

SEQ ID NO: 554 - RNA, 33 nt, synthetic construct
  source 1..33: mol_type = other RNA
tcaaagtcttttagctgcactaaaagactttga

SEQ ID NO: 555 - RNA, 33 nt, synthetic construct
  source 1..33: mol_type = other RNA
acgagttccggaatgtcccattccggaactcgt

SEQ ID NO: 556 - RNA, 33 nt, synthetic construct
  source 1..33: mol_type = other RNA
gaagcaattctcctcagcaaggagaattgcttc

SEQ ID NO: 557 - RNA, 33 nt, synthetic construct
  source 1..33: mol_type = other RNA
aaacgatgttctcttctgcagagaacatcgttt

SEQ ID NO: 558 - RNA, 33 nt, synthetic construct
  source 1..33: mol_type = other RNA
tggatcccgaagatgacaaatcttcgggatcca

SEQ ID NO: 559 - RNA, 33 nt, synthetic construct
  source 1..33: mol_type = other RNA
cagagcttgttcagctttcctgaacaagctctg

SEQ ID NO: 560 - RNA, 33 nt, synthetic construct
  source 1..33: mol_type = other RNA
atagacatagtggcatcctgccactatgtctat

SEQ ID NO: 561 - RNA, 33 nt, synthetic construct
  source 1..33: mol_type = other RNA
aggtaattgttggagttgctccaacaattacct

SEQ ID NO: 562 - RNA, 33 nt, synthetic construct
  source 1..33: mol_type = other RNA
tctgattccttccggcacgcggaaggaatcaga

SEQ ID NO: 563 - RNA, 33 nt, synthetic construct
  source 1..33: mol_type = other RNA
tgaaaccctcattttccttaaatgagggtttca

SEQ ID NO: 564 - RNA, 33 nt, synthetic construct
  source 1..33: mol_type = other RNA
gatcatagtgttcttggcaagaacactatgatc

SEQ ID NO: 565 - RNA, 33 nt, synthetic construct
  source 1..33: mol_type = other RNA
ggtgctggttttatggtgaataaaaccagcacc

SEQ ID NO: 566 - RNA, 33 nt, synthetic construct
  source 1..33: mol_type = other RNA
caaagggcattcctggtttaggaatgccctttg

SEQ ID NO: 567 - RNA, 33 nt, synthetic construct
  source 1..33: mol_type = other RNA
tccaggttactcctggccaaggagtaacctgga

SEQ ID NO: 568 - RNA, 33 nt, synthetic construct
  source 1..33: mol_type = other RNA
aaagtcttttagctgcagtagctaaaagacttt

SEQ ID NO: 569 - RNA, 33 nt, synthetic construct
  source 1..33: mol_type = other RNA
ctgggttgtctgaaggccattcagacaacccag

SEQ ID NO: 570 - RNA, 33 nt, synthetic construct
  source 1..33: mol_type = other RNA
tccagctcatacttggagaaagtatgagctgga

SEQ ID NO: 571 - RNA, 33 nt, synthetic construct
  source 1..33: mol_type = other RNA
agaagtcctgcattactgtaatgcaggacttct

SEQ ID NO: 572 - RNA, 33 nt, synthetic construct
  source 1..33: mol_type = other RNA
ccagatcttactctgcgtcagagtaagatctgg

SEQ ID NO: 573 - RNA, 33 nt, synthetic construct
  source 1..33: mol_type = other RNA
cgggcttctgcttctccaggaagcagaagcccg

SEQ ID NO: 574 - RNA, 33 nt, synthetic construct
  source 1..33: mol_type = other RNA
gctggttttatggtgacctaccataaaaccagc

SEQ ID NO: 575 - RNA, 33 nt, synthetic construct
  source 1..33: mol_type = other RNA
gggcacccaaagacaaccagtctttgggtgccc

SEQ ID NO: 576 - RNA, 33 nt, synthetic construct
  source 1..33: mol_type = other RNA
gagctcttggttctgccggagaaccaagagctc

SEQ ID NO: 577 - RNA, 33 nt, synthetic construct
  source 1..33: mol_type = other RNA
aggaagttgacgttgagggaacgtcaacttcct

SEQ ID NO: 578 - RNA, 33 nt, synthetic construct
  source 1..33: mol_type = other RNA
ggcagagctgggttgtctgaacccagctctgcc

SEQ ID NO: 579 - RNA, 33 nt, synthetic construct
  source 1..33: mol_type = other RNA
catagtccactcctggctcaggagtggactatg

SEQ ID NO: 580 - RNA, 33 nt, synthetic construct
  source 1..33: mol_type = other RNA
gtcgaatttattacaggtggtaataaattcgac

SEQ ID NO: 581 - RNA, 33 nt, synthetic construct
  source 1..33: mol_type = other RNA
tagaatttctctgtaggctacagagaaattcta

SEQ ID NO: 582 - RNA, 33 nt, synthetic construct
  source 1..33: mol_type = other RNA
tagtgttcttggcatcctgtgccaagaacacta

SEQ ID NO: 583 - RNA, 33 nt, synthetic construct
  source 1..33: mol_type = other RNA
ggaaacgatgttctcttctagaacatcgtttcc

SEQ ID NO: 584 - RNA, 33 nt, synthetic construct
  source 1..33: mol_type = other RNA
tagtaggctcggatcttccatccgagcctacta

SEQ ID NO: 585 - RNA, 33 nt, synthetic construct
  source 1..33: mol_type = other RNA
ttctcctcagcacagcggctgtgctgaggagaa

SEQ ID NO: 586 - RNA, 33 nt, synthetic construct
  source 1..33: mol_type = other RNA
gtgcgcaccgtgatgctcaatcacggtgcgcac

SEQ ID NO: 587 - RNA, 33 nt, synthetic construct
  source 1..33: mol_type = other RNA
atgtactcgtcaaagtcattttgacgagtacat

SEQ ID NO: 588 - RNA, 33 nt, synthetic construct
  source 1..33: mol_type = other RNA
gccgtgagggccatgtcttatggccctcacggc

SEQ ID NO: 589 - RNA, 33 nt, synthetic construct
  source 1..33: mol_type = other RNA
gggttctcaatgttgaccaaacattgagaaccc

SEQ ID NO: 590 - RNA, 33 nt, synthetic construct
  source 1..33: mol_type = other RNA
cctgacaccgtcactgatggtgacggtgtcagg

SEQ ID NO: 591 - RNA, 33 nt, synthetic construct
  source 1..33: mol_type = other RNA
tatgacctcgaaactgggcgtttcgaggtcata

SEQ ID NO: 592 - RNA, 33 nt, synthetic construct
  source 1..33: mol_type = other RNA
ttgaggtcgaatttattacaaattcgacctcaa

SEQ ID NO: 593 - RNA, 33 nt, synthetic construct
  source 1..33: mol_type = other RNA
cctcattttccttggtctccaaggaaaatgagg

SEQ ID NO: 594 - RNA, 33 nt, synthetic construct
  source 1..33: mol_type = other RNA
gacttttgtatgaagcaatttcatacaaaagtc

SEQ ID NO: 595 - RNA, 33 nt, synthetic construct
  source 1..33: mol_type = other RNA
agagtgtgagaccttgtccaggtctcacactct

SEQ ID NO: 596 - RNA, 33 nt, synthetic construct
  source 1..33: mol_type = other RNA
tcgaatttattacaggtgatgtaataaattcga

SEQ ID NO: 597 - RNA, 33 nt, synthetic construct
  source 1..33: mol_type = other RNA
ccaacctgcacctcatccggaggtgcaggttgg

SEQ ID NO: 598 - RNA, 33 nt, synthetic construct
  source 1..33: mol_type = other RNA
tcagagtgtgagaccttgtgtctcacactctga

SEQ ID NO: 599 - RNA, 33 nt, synthetic construct
  source 1..33: mol_type = other RNA
tatctctgttcattgagccaatgaacagagata

SEQ ID NO: 600 - RNA, 33 nt, synthetic construct
  source 1..33: mol_type = other RNA
aagaagtcctgcattactgatgcaggacttctt

SEQ ID NO: 601 - RNA, 33 nt, synthetic construct
  source 1..33: mol_type = other RNA
tacagatctcaaggatcatccttgagatctgta

SEQ ID NO: 602 - RNA, 33 nt, synthetic construct
  source 1..33: mol_type = other RNA
tcggatcttccactggcccagtggaagatccga

SEQ ID NO: 603 - RNA, 33 nt, synthetic construct
  source 1..33: mol_type = other RNA
gaagtctcctgctttagtgaagcaggagacttc

SEQ ID NO: 604 - RNA, 33 nt, synthetic construct
  source 1..33: mol_type = other RNA
aagcaattctcctcagcacgaggagaattgctt

SEQ ID NO: 605 - RNA, 33 nt, synthetic construct
  source 1..33: mol_type = other RNA
cgaatttattacaggtgagctgtaataaattcg

SEQ ID NO: 606 - RNA, 33 nt, synthetic construct
  source 1..33: mol_type = other RNA
tccaggctggataagctctttatccagcctgga

SEQ ID NO: 607 - RNA, 33 nt, synthetic construct
  source 1..33: mol_type = other RNA
tagtagcggatcttggcctaagatccgctacta

SEQ ID NO: 608 - RNA, 33 nt, synthetic construct
  source 1..33: mol_type = other RNA
tccaggttgtaataggcgttattacaacctgga

SEQ ID NO: 609 - RNA, 33 nt, synthetic construct
  source 1..33: mol_type = other RNA
gtcatcatggatatgtccaatatccatgatgac

SEQ ID NO: 610 - RNA, 33 nt, synthetic construct
  source 1..33: mol_type = other RNA
tattggtgaactttgaaagaaagttcaccaata

SEQ ID NO: 611 - RNA, 33 nt, synthetic construct
  source 1..33: mol_type = other RNA
aacagagtagggtagccgctaccctactctgtt

SEQ ID NO: 612 - RNA, 33 nt, synthetic construct
  source 1..33: mol_type = other RNA
catagtggcatcctggtctaggatgccactatg

SEQ ID NO: 613 - RNA, 33 nt, synthetic construct
  source 1..33: mol_type = other RNA
ttatctttggctgtggtcaacagccaaagataa

SEQ ID NO: 614 - RNA, 33 nt, synthetic construct
  source 1..33: mol_type = other RNA
agggcataggatgtggcctacatcctatgccct

SEQ ID NO: 615 - RNA, 33 nt, synthetic construct
  source 1..33: mol_type = other RNA
gcctcttttctgtttccggaacagaaaagaggc

SEQ ID NO: 616 - RNA, 33 nt, synthetic construct
  source 1..33: mol_type = other RNA
gatcgcaggaggctggcagagcctcctgcgatc

SEQ ID NO: 617 - RNA, 33 nt, synthetic construct
  source 1..33: mol_type = other RNA
acatagtccactcctggctggagtggactatgt

SEQ ID NO: 618 - RNA, 33 nt, synthetic construct
  source 1..33: mol_type = other RNA
cccagatcttactctgcgtgagtaagatctggg

SEQ ID NO: 619 - RNA, 33 nt, synthetic construct
  source 1..33: mol_type = other RNA
gaaaccctcattttccttgaaaatgagggtttc

SEQ ID NO: 620 - RNA, 33 nt, synthetic construct
  source 1..33: mol_type = other RNA
gttctgccggtaattgtagattaccggcagaac

SEQ ID NO: 621 - RNA, 33 nt, synthetic construct
  source 1..33: mol_type = other RNA
agtcatcctcagagtgtgactctgaggatgact

SEQ ID NO: 622 - RNA, 33 nt, synthetic construct
  source 1..33: mol_type = other RNA
agggacttcctgacaccgtgtcaggaagtccct

SEQ ID NO: 623 - RNA, 33 nt, synthetic construct
  source 1..33: mol_type = other RNA
acgtactccttcacctcaagtgaaggagtacgt

SEQ ID NO: 624 - RNA, 33 nt, synthetic construct
  source 1..33: mol_type = other RNA
gagaattctggtctcagacagaccagaattctc

SEQ ID NO: 625 - RNA, 33 nt, synthetic construct
  source 1..33: mol_type = other RNA
aacaccatgaaggtggcctaccttcatggtgtt

SEQ ID NO: 626 - RNA, 33 nt, synthetic construct
  source 1..33: mol_type = other RNA
ccaaggcttggaacaccatgttccaagccttgg

SEQ ID NO: 627 - RNA, 33 nt, synthetic construct
  source 1..33: mol_type = other RNA
tatctttggctgtggtcagcacagccaaagata

SEQ ID NO: 628 - RNA, 33 nt, synthetic construct
  source 1..33: mol_type = other RNA
tgtagttgcagcagtccagctgctgcaactaca

SEQ ID NO: 629 - RNA, 33 nt, synthetic construct
  source 1..33: mol_type = other RNA
aaactgggcagcacgtactgtgctgcccagttt

SEQ ID NO: 630 - RNA, 33 nt, synthetic construct
  source 1..33: mol_type = other RNA
cgtagtatctctgttcattacagagatactacg

SEQ ID NO: 631 - RNA, 33 nt, synthetic construct
  source 1..33: mol_type = other RNA
gtaggctccactatgacctatagtggagcctac

SEQ ID NO: 632 - RNA, 33 nt, synthetic construct
  source 1..33: mol_type = other RNA
caggtaggtgtagtagcggactacacctacctg

SEQ ID NO: 633 - RNA, 33 nt, synthetic construct
  source 1..33: mol_type = other RNA
acaaaggccgtgagggccactcacggcctttgt

SEQ ID NO: 634 - RNA, 33 nt, synthetic construct
  source 1..33: mol_type = other RNA
tagaaccgggtacagcttttgtacccggttcta

SEQ ID NO: 635 - RNA, 33 nt, synthetic construct
  source 1..33: mol_type = other RNA
gggcataggatgtggcctccacatcctatgccc

SEQ ID NO: 636 - RNA, 33 nt, synthetic construct
  source 1..33: mol_type = other RNA
tggtgatggagtctttcaaagactccatcacca

SEQ ID NO: 637 - RNA, 33 nt, synthetic construct
  source 1..33: mol_type = other RNA
atgacctcgaaactgggcaagtttcgaggtcat

SEQ ID NO: 638 - RNA, 33 nt, synthetic construct
  source 1..33: mol_type = other RNA
aaaccctcattttccttgggaaaatgagggttt

SEQ ID NO: 639 - RNA, 33 nt, synthetic construct
  source 1..33: mol_type = other RNA
tcaatggccatgatgtactatcatggccattga

SEQ ID NO: 640 - RNA, 33 nt, synthetic construct
  source 1..33: mol_type = other RNA
tcgtcaaagtcattggacaaatgactttgacga

SEQ ID NO: 641 - RNA, 33 nt, synthetic construct
  source 1..33: mol_type = other RNA
cctcaccttgagctcttggagctcaaggtgagg

SEQ ID NO: 642 - RNA, 33 nt, synthetic construct
  source 1..33: mol_type = other RNA
ccaggatcagccatttaacatggctgatcctgg

SEQ ID NO: 643 - RNA, 33 nt, synthetic construct
  source 1..33: mol_type = other RNA
gaaacgatgttctcttctggagaacatcgtttc

SEQ ID NO: 644 - RNA, 33 nt, synthetic construct
  source 1..33: mol_type = other RNA
cctgggaagtcgtggacagcacgacttcccagg

SEQ ID NO: 645 - RNA, 33 nt, synthetic construct
  source 1..33: mol_type = other RNA
agaaggctttgtccagctcggacaaagccttct

SEQ ID NO: 646 - RNA, 33 nt, synthetic construct
  source 1..33: mol_type = other RNA
ctgacaccgtcactgatgaagtgacggtgtcag

SEQ ID NO: 647 - RNA, 33 nt, synthetic construct
  source 1..33: mol_type = other RNA
gagatgcaggtaattgttgattacctgcatctc

SEQ ID NO: 648 - RNA, 33 nt, synthetic construct
  source 1..33: mol_type = other RNA
tgacaaaggcagttccctcaactgcctttgtca

SEQ ID NO: 649 - RNA, 33 nt, synthetic construct
  source 1..33: mol_type = other RNA
gtcaaagtcttttagctgctaaaagactttgac

SEQ ID NO: 650 - RNA, 33 nt, synthetic construct
  source 1..33: mol_type = other RNA
agaatctcccacgtggtgaacgtgggagattct

SEQ ID NO: 651 - RNA, 33 nt, synthetic construct
  source 1..33: mol_type = other RNA
accagtcgggtcttgtacaaagacccgactggt

SEQ ID NO: 652 - RNA, 33 nt, synthetic construct
  source 1..33: mol_type = other RNA
tgttcttggcatcctgaggggatgccaagaaca

SEQ ID NO: 653 - RNA, 33 nt, synthetic construct
  source 1..33: mol_type = other RNA
agtagttccaccctcacctagggtggaactact

SEQ ID NO: 654 - RNA, 33 nt, synthetic construct
  source 1..33: mol_type = other RNA
ccaggttgtaataggcgtactattacaacctgg

SEQ ID NO: 655 - RNA, 33 nt, synthetic construct
  source 1..33: mol_type = other RNA
gggcgcatcctcctggaagaggaggatgcgccc

SEQ ID NO: 656 - RNA, 33 nt, synthetic construct
  source 1..33: mol_type = other RNA
cagcggttcttatctttgggataagaaccgctg

SEQ ID NO: 657 - RNA, 33 nt, synthetic construct
  source 1..33: mol_type = other RNA
tgcattactgtgacctcgagtcacagtaatgca

SEQ ID NO: 658 - RNA, 33 nt, synthetic construct
  source 1..33: mol_type = other RNA
cctcaaactcagtggagaacactgagtttgagg

SEQ ID NO: 659 - RNA, 33 nt, synthetic construct
  source 1..33: mol_type = other RNA
ggagaaggctttgtccagcacaaagccttctcc

SEQ ID NO: 660 - RNA, 33 nt, synthetic construct
  source 1..33: mol_type = other RNA
ctggatgaagaggtacccgacctcttcatccag

SEQ ID NO: 661 - RNA, 33 nt, synthetic construct
  source 1..33: mol_type = other RNA
tggattgtggagtagttcctactccacaatcca

SEQ ID NO: 662 - RNA, 33 nt, synthetic construct
  source 1..33: mol_type = other RNA
tcatccaggttactcctggagtaacctggatga

SEQ ID NO: 663 - RNA, 33 nt, synthetic construct
  source 1..33: mol_type = other RNA
ttccaccctcaccttgagcaggtgagggtggaa

SEQ ID NO: 664 - RNA, 33 nt, synthetic construct
  source 1..33: mol_type = other RNA
ttggcttcaaggaagtctcttccttgaagccaa

SEQ ID NO: 665 - RNA, 33 nt, synthetic construct
  source 1..33: mol_type = other RNA
gagaaggctttgtccagctgacaaagccttctc

SEQ ID NO: 666 - RNA, 33 nt, synthetic construct
  source 1..33: mol_type = other RNA
cggtgctggttttatggtgtaaaaccagcaccg

SEQ ID NO: 667 - RNA, 33 nt, synthetic construct
  source 1..33: mol_type = other RNA
gccaccaccgtagtatctcactacggtggtggc

SEQ ID NO: 668 - RNA, 33 nt, synthetic construct
  source 1..33: mol_type = other RNA
tggctcacaggccttgtccaggcctgtgagcca

SEQ ID NO: 669 - RNA, 33 nt, synthetic construct
  source 1..33: mol_type = other RNA
gtacagatctcaaggatcacttgagatctgtac

SEQ ID NO: 670 - RNA, 33 nt, synthetic construct
  source 1..33: mol_type = other RNA
ctctgtaggttcatgtagtatgaacctacagag

SEQ ID NO: 671 - RNA, 33 nt, synthetic construct
  source 1..33: mol_type = other RNA
ccacagttttgttcattctgaacaaaactgtgg

SEQ ID NO: 672 - RNA, 33 nt, synthetic construct
  source 1..33: mol_type = other RNA
gccaaggcttggaacaccattccaagccttggc

SEQ ID NO: 673 - RNA, 33 nt, synthetic construct
  source 1..33: mol_type = other RNA
ttggagttgcccacggtgcgtgggcaactccaa

SEQ ID NO: 674 - RNA, 33 nt, synthetic construct
  source 1..33: mol_type = other RNA
tgatcgcaggaggctggcagcctcctgcgatca

SEQ ID NO: 675 - RNA, 33 nt, synthetic construct
  source 1..33: mol_type = other RNA
cagaatctcccacgtggtgcgtgggagattctg

SEQ ID NO: 676 - RNA, 33 nt, synthetic construct
  source 1..33: mol_type = other RNA
ccatgttgacgagttccggactcgtcaacatgg

SEQ ID NO: 677 - RNA, 33 nt, synthetic construct
  source 1..33: mol_type = other RNA
aatatattcatgagcttcgctcatgaatatatt

SEQ ID NO: 678 - RNA, 33 nt, synthetic construct
  source 1..33: mol_type = other RNA
gagcttgttcagctttccaagctgaacaagctc

SEQ ID NO: 679 - RNA, 33 nt, synthetic construct
  source 1..33: mol_type = other RNA
aatgatgtcctcatccaggatgaggacatcatt

SEQ ID NO: 680 - RNA, 33 nt, synthetic construct
  source 1..33: mol_type = other RNA
ttgtatgaagcaattctccattgcttcatacaa

SEQ ID NO: 681 - RNA, 33 nt, synthetic construct
  source 1..33: mol_type = other RNA
ccttggtctcttctgatcgagaagagaccaagg

SEQ ID NO: 682 - RNA, 33 nt, synthetic construct
  source 1..33: mol_type = other RNA
cggtgatggtgacctccagggtcaccatcaccg

SEQ ID NO: 683 - RNA, 33 nt, synthetic construct
  source 1..33: mol_type = other RNA
tggataagctctacattaagtagagcttatcca

SEQ ID NO: 684 - RNA, 33 nt, synthetic construct
  source 1..33: mol_type = other RNA
tgcacctcatccgagcctgtcggatgaggtgca

SEQ ID NO: 685 - RNA, 33 nt, synthetic construct
  source 1..33: mol_type = other RNA
gcgtaatccttcccactgcgggaaggattacgc

SEQ ID NO: 686 - RNA, 33 nt, synthetic construct
  source 1..33: mol_type = other RNA
agccaacgcacgacgggaggtcgtgcgttggct

SEQ ID NO: 687 - RNA, 33 nt, synthetic construct
  source 1..33: mol_type = other RNA
tcaaggatcatagtgttctactatgatccttga

SEQ ID NO: 688 - RNA, 33 nt, synthetic construct
  source 1..33: mol_type = other RNA
tgacctcgaaactgggcagcagtttcgaggtca

SEQ ID NO: 689 - RNA, 33 nt, synthetic construct
  source 1..33: mol_type = other RNA
ccaccacgtcccagatcttctgggacgtggtgg

SEQ ID NO: 690 - RNA, 33 nt, synthetic construct
  source 1..33: mol_type = other RNA
gttgatgctgagtttggccaactcagcatcaac

SEQ ID NO: 691 - RNA, 33 nt, synthetic construct
  source 1..33: mol_type = other RNA
acagttttgttcattctgaatgaacaaaactgt

SEQ ID NO: 692 - RNA, 33 nt, synthetic construct
  source 1..33: mol_type = other RNA
ctggattgtggagtagttcactccacaatccag

SEQ ID NO: 693 - RNA, 33 nt, synthetic construct
  source 1..33: mol_type = other RNA
caaggaagtctcctgctttaggagacttccttg

SEQ ID NO: 694 - RNA, 33 nt, synthetic construct
  source 1..33: mol_type = other RNA
tggtctcttctgatcgcagatcagaagagacca

SEQ ID NO: 695 - RNA, 33 nt, synthetic construct
  source 1..33: mol_type = other RNA
taggctccactatgacctccatagtggagccta

SEQ ID NO: 696 - RNA, 33 nt, synthetic construct
  source 1..33: mol_type = other RNA
cctgggttagagactgcacgtctctaacccagg

SEQ ID NO: 697 - RNA, 33 nt, synthetic construct
  source 1..33: mol_type = other RNA
tgagaccttgtccaggtagtggacaaggtctca

SEQ ID NO: 698 - RNA, 33 nt, synthetic construct
  source 1..33: mol_type = other RNA
gtccttttggtattgagccaataccaaaaggac

SEQ ID NO: 699 - RNA, 33 nt, synthetic construct
  source 1..33: mol_type = other RNA
agcggttcttatctttggcagataagaaccgct

SEQ ID NO: 700 - RNA, 33 nt, synthetic construct
  source 1..33: mol_type = other RNA
gagatgagaacaaaggccgtttgttctcatctc

SEQ ID NO: 701 - RNA, 33 nt, synthetic construct
  source 1..33: mol_type = other RNA
tagtagaatttctctgtaggagaaattctacta

SEQ ID NO: 702 - RNA, 33 nt, synthetic construct
  source 1..33: mol_type = other RNA
caaggagtcctgcttgaccagcaggactccttg

SEQ ID NO: 703 - RNA, 33 nt, synthetic construct
  source 1..33: mol_type = other RNA
gcacgtactccttcacctcgaaggagtacgtgc

SEQ ID NO: 704 - RNA, 33 nt, synthetic construct
  source 1..33: mol_type = other RNA
ccttgacttccacttcctgagtggaagtcaagg

SEQ ID NO: 705 - RNA, 33 nt, synthetic construct
  source 1..33: mol_type = other RNA
tagacatagtggcatcctgtgccactatgtcta

SEQ ID NO: 706 - RNA, 33 nt, synthetic construct
  source 1..33: mol_type = other RNA
agtcaaagtcttttagctgaaaagactttgact

SEQ ID NO: 707 - RNA, 33 nt, synthetic construct
  source 1..33: mol_type = other RNA
agggattcaggcagggaaactgcctgaatccct

SEQ ID NO: 708 - RNA, 33 nt, synthetic construct
  source 1..33: mol_type = other RNA
tcatagtgttcttggcatccaagaacactatga

SEQ ID NO: 709 - RNA, 33 nt, synthetic construct
  source 1..33: mol_type = other RNA
gcagcacgtactccttcacggagtacgtgctgc

SEQ ID NO: 710 - RNA, 33 nt, synthetic construct
  source 1..33: mol_type = other RNA
ctgtggtcagaaatttgttatttctgaccacag

SEQ ID NO: 711 - RNA, 33 nt, synthetic construct
  source 1..33: mol_type = other RNA
cagagtagggtagccgcaggctaccctactctg

SEQ ID NO: 712 - RNA, 33 nt, synthetic construct
  source 1..33: mol_type = other RNA
ccgaagatgacaaaggcagtttgtcatcttcgg

SEQ ID NO: 713 - RNA, 33 nt, synthetic construct
  source 1..33: mol_type = other RNA
ttttagctgcagtagggcctactgcagctaaaa

SEQ ID NO: 714 - RNA, 33 nt, synthetic construct
  source 1..33: mol_type = other RNA
ctatcttcagggtcatctggaccctgaagatag

SEQ ID NO: 715 - RNA, 33 nt, synthetic construct
  source 1..33: mol_type = other RNA
aaatatattcatgagcttctcatgaatatattt

SEQ ID NO: 716 - RNA, 33 nt, synthetic construct
  source 1..33: mol_type = other RNA
gaacaaaggccgtgagggccacggcctttgttc

SEQ ID NO: 717 - RNA, 33 nt, synthetic construct
  source 1..33: mol_type = other RNA
tagttggcttcaaggaagtcttgaagccaacta

SEQ ID NO: 718 - RNA, 33 nt, synthetic construct
  source 1..33: mol_type = other RNA
tttagctgcagtagggccactactgcagctaaa

SEQ ID NO: 719 - RNA, 33 nt, synthetic construct
  source 1..33: mol_type = other RNA
gagtgtgagaccttgtccaaaggtctcacactc

SEQ ID NO: 720 - RNA, 33 nt, synthetic construct
  source 1..33: mol_type = other RNA
aggaacctggcggtgatggaccgccaggttcct

SEQ ID NO: 721 - RNA, 33 nt, synthetic construct
  source 1..33: mol_type = other RNA
cattcgtcctcctcgggccgaggaggacgaatg

SEQ ID NO: 722 - RNA, 33 nt, synthetic construct
  source 1..33: mol_type = other RNA
gggcattcctggtttgaagaaccaggaatgccc

SEQ ID NO: 723 - RNA, 33 nt, synthetic construct
  source 1..33: mol_type = other RNA
gcccacggtgctgtagggcacagcaccgtgggc

SEQ ID NO: 724 - RNA, 33 nt, synthetic construct
  source 1..33: mol_type = other RNA
tcagactcggtgtccgggagacaccgagtctga

SEQ ID NO: 725 - RNA, 33 nt, synthetic construct
  source 1..33: mol_type = other RNA
gtccactcctggctcacagagccaggagtggac

SEQ ID NO: 726 - RNA, 33 nt, synthetic construct
  source 1..33: mol_type = other RNA
atgaagtcggtggtgatggaccaccgacttcat

SEQ ID NO: 727 - RNA, 33 nt, synthetic construct
  source 1..33: mol_type = other RNA
gcagttccctccactttctgtggagggaactgc

SEQ ID NO: 728 - RNA, 33 nt, synthetic construct
  source 1..33: mol_type = other RNA
cttgagctcttggttctgcaccaagagctcaag

SEQ ID NO: 729 - RNA, 33 nt, synthetic construct
  source 1..33: mol_type = other RNA
cagctttccatcctcctttaggatggaaagctg

SEQ ID NO: 730 - RNA, 33 nt, synthetic construct
  source 1..33: mol_type = other RNA
tgcagcgagatgagaacaactcatctcgctgca

SEQ ID NO: 731 - RNA, 33 nt, synthetic construct
  source 1..33: mol_type = other RNA
cttcagggtcatctgctgcagatgaccctgaag

SEQ ID NO: 732 - RNA, 33 nt, synthetic construct
  source 1..33: mol_type = other RNA
ccgacaaggtgccttggccaggcaccttgtcgg

SEQ ID NO: 733 - RNA, 33 nt, synthetic construct
  source 1..33: mol_type = other RNA
ttctgccggtaattgtagaaattaccggcagaa

SEQ ID NO: 734 - RNA, 33 nt, synthetic construct
  source 1..33: mol_type = other RNA
cagactcggtgtccgggacggacaccgagtctg

SEQ ID NO: 735 - RNA, 33 nt, synthetic construct
  source 1..33: mol_type = other RNA
ggccatgtctttctcgttgagaaagacatggcc

SEQ ID NO: 736 - RNA, 33 nt, synthetic construct
  source 1..33: mol_type = other RNA
tggaacaccatgaaggtggttcatggtgttcca

SEQ ID NO: 737 - RNA, 33 nt, synthetic construct
  source 1..33: mol_type = other RNA
taggcgtagaccttgactgaaggtctacgccta

SEQ ID NO: 738 - RNA, 33 nt, synthetic construct
  source 1..33: mol_type = other RNA
gttactcctggccaggccctggccaggagtaac

SEQ ID NO: 739 - RNA, 33 nt, synthetic construct
  source 1..33: mol_type = other RNA
gtaggatctctgtaggttctacagagatcctac

SEQ ID NO: 740 - RNA, 33 nt, synthetic construct
  source 1..33: mol_type = other RNA
tgcaggtaattgttggagtaacaattacctgca

SEQ ID NO: 741 - RNA, 33 nt, synthetic construct
  source 1..33: mol_type = other RNA
tgtgaaaccctcattttccatgagggtttcaca

SEQ ID NO: 742 - RNA, 33 nt, synthetic construct
  source 1..33: mol_type = other RNA
tgtagttggcttcaaggaatgaagccaactaca

SEQ ID NO: 743 - RNA, 33 nt, synthetic construct
  source 1..33: mol_type = other RNA
agagtagggtagccgcaggggctaccctactct

SEQ ID NO: 744 - RNA, 33 nt, synthetic construct
  source 1..33: mol_type = other RNA
atcatagtgttcttggcataagaacactatgat

SEQ ID NO: 745 - RNA, 33 nt, synthetic construct
  source 1..33: mol_type = other RNA
ggaggctggcagattcccaatctgccagcctcc

SEQ ID NO: 746 - RNA, 33 nt, synthetic construct
  source 1..33: mol_type = other RNA
ctcaaggatcatagtgttcctatgatccttgag

SEQ ID NO: 747 - RNA, 33 nt, synthetic construct
  source 1..33: mol_type = other RNA
atggccatgatgtactcgttacatcatggccat

SEQ ID NO: 748 - RNA, 33 nt, synthetic construct
  source 1..33: mol_type = other RNA
gcagagcttgttcagcttttgaacaagctctgc

SEQ ID NO: 749 - RNA, 33 nt, synthetic construct
  source 1..33: mol_type = other RNA
tgcaccatgtcactgcctgagtgacatggtgca

SEQ ID NO: 750 - RNA, 33 nt, synthetic construct
  source 1..33: mol_type = other RNA
cagtcatcatggatatgtcatccatgatgactg

SEQ ID NO: 751 - RNA, 19 nt, synthetic construct
  source 1..19: mol_type = other RNA
  misc_difference 1: note = 2'-O-methyl modified nucleotide with phosphorothioate linkage may be modified with 5'-Phosphate
  modified_base 2: mod_base = OTHER; note = 2'-fluoro modified nucleotide with phosphorothioate linkage
  modified_base 3: mod_base = OTHER; note = 2'-O-methyl modified nucleotide
  modified_base 4: mod_base = OTHER; note = 2'-fluoro modified nucleotide
  modified_base 5: mod_base = OTHER; note = 2'-O-methyl modified nucleotide
  modified_base 6: mod_base = OTHER; note = 2'-fluoro modified nucleotide
  modified_base 7: mod_base = OTHER; note = 2'-O-methyl modified nucleotide
  modified_base 8: mod_base = OTHER; note = 2'-fluoro modified nucleotide
  modified_base 9: mod_base = OTHER; note = 2'-O-methyl modified nucleotide
  modified_base 10: mod_base = OTHER; note = 2'-fluoro modified nucleotide
  modified_base 11: mod_base = OTHER; note = 2'-O-methyl modified nucleotide
  modified_base 12: mod_base = OTHER; note = 2'-fluoro modified nucleotide
  modified_base 13: mod_base = OTHER; note = 2'-O-methyl modified nucleotide
  modified_base 14: mod_base = OTHER; note = 2'-fluoro modified nucleotide with phosphorothioate linkage
  modified_base 15: mod_base = OTHER; note = 2'-O-methyl modified nucleotide with phosphorothioate linkage
  modified_base 16: mod_base = OTHER; note = 2'-fluoro modified nucleotide with phosphorothioate linkage
  modified_base 17: mod_base = OTHER; note = 2'-O-methyl modified nucleotide with phosphorothioate linkage
  modified_base 18: mod_base = OTHER; note = 2'-fluoro modified nucleotide with phosphorothioate linkage
  misc_difference 19: note = 2'-O-methyl modified nucleotide may be attached to trivalent N-Acetylgalactosamine
taggctcggatcttccact

SEQ ID NO: 752 - RNA, 19 nt, synthetic construct
  source 1..19: mol_type = other RNA
  misc_difference 1: note = 2'-O-methyl modified nucleotide with phosphorothioate linkage may be modified with 5'-Phosphate
  modified_base 2: mod_base = OTHER; note = 2'-fluoro modified nucleotide with phosphorothioate linkage
  modified_base 3: mod_base = OTHER; note = 2'-O-methyl modified nucleotide
  modified_base 4: mod_base = OTHER; note = 2'-fluoro modified nucleotide
  modified_base 5: mod_base = OTHER; note = 2'-O-methyl modified nucleotide
  modified_base 6: mod_base = OTHER; note = 2'-fluoro modified nucleotide
  modified_base 7: mod_base = OTHER; note = 2'-O-methyl modified nucleotide
  modified_base 8: mod_base = OTHER; note = 2'-fluoro modified nucleotide
  modified_base 9: mod_base = OTHER; note = 2'-O-methyl modified nucleotide
  modified_base 10: mod_base = OTHER; note = 2'-fluoro modified nucleotide
  modified_base 11: mod_base = OTHER; note = 2'-O-methyl modified nucleotide
  modified_base 12: mod_base = OTHER; note = 2'-fluoro modified nucleotide
  modified_base 13: mod_base = OTHER; note = 2'-O-methyl modified nucleotide
  modified_base 14: mod_base = OTHER; note = 2'-fluoro modified nucleotide with phosphorothioate linkage
  modified_base 15: mod_base = OTHER; note = 2'-O-methyl modified nucleotide with phosphorothioate linkage
  modified_base 16: mod_base = OTHER; note = 2'-fluoro modified nucleotide with phosphorothioate linkage
  modified_base 17: mod_base = OTHER; note = 2'-O-methyl modified nucleotide with phosphorothioate linkage
  modified_base 18: mod_base = OTHER; note = 2'-fluoro modified nucleotide with phosphorothioate linkage
  misc_difference 19: note = 2'-O-methyl modified nucleotide may be attached to trivalent N-Acetylgalactosamine
tgagagaagaccttgacca

SEQ ID NO: 753 - RNA, 19 nt, synthetic construct
  source 1..19: mol_type = other RNA
  misc_difference 1: note = 2'-O-methyl modified nucleotide with phosphorothioate linkage may be modified with 5'-Phosphate
  modified_base 2: mod_base = OTHER; note = 2'-fluoro modified nucleotide with phosphorothioate linkage
  modified_base 3: mod_base = OTHER; note = 2'-O-methyl modified nucleotide
  modified_base 4: mod_base = OTHER; note = 2'-fluoro modified nucleotide
  modified_base 5: mod_base = OTHER; note = 2'-O-methyl modified nucleotide
  modified_base 6: mod_base = OTHER; note = 2'-fluoro modified nucleotide
  modified_base 7: mod_base = OTHER; note = 2'-O-methyl modified nucleotide
  modified_base 8: mod_base = OTHER; note = 2'-fluoro modified nucleotide
  modified_base 9: mod_base = OTHER; note = 2'-O-methyl modified nucleotide
  modified_base 10: mod_base = OTHER; note = 2'-fluoro modified nucleotide
  modified_base 11: mod_base = OTHER; note = 2'-O-methyl modified nucleotide
  modified_base 12: mod_base = OTHER; note = 2'-fluoro modified nucleotide
  modified_base 13: mod_base = OTHER; note = 2'-O-methyl modified nucleotide
  modified_base 14: mod_base = OTHER; note = 2'-fluoro modified nucleotide with phosphorothioate linkage
  modified_base 15: mod_base = OTHER; note = 2'-O-methyl modified nucleotide with phosphorothioate linkage
  modified_base 16: mod_base = OTHER; note = 2'-fluoro modified nucleotide with phosphorothioate linkage
  modified_base 17: mod_base = OTHER; note = 2'-O-methyl modified nucleotide with phosphorothioate linkage
  modified_base 18: mod_base = OTHER; note = 2'-fluoro modified nucleotide with phosphorothioate linkage
  misc_difference 19: note = 2'-O-methyl modified nucleotide may be attached to trivalent N-Acetylgalactosamine
tcacacagatccctttctt

SEQ ID NO: 754 - RNA, 19 nt, synthetic construct
  source 1..19: mol_type = other RNA
  misc_difference 1: note = 2'-O-methyl modified nucleotide with phosphorothioate linkage may be modified with 5'-Phosphate
  modified_base 2: mod_base = OTHER; note = 2'-fluoro modified nucleotide with phosphorothioate linkage
  modified_base 3: mod_base = OTHER; note = 2'-O-methyl modified nucleotide
  modified_base 4: mod_base = OTHER; note = 2'-fluoro modified nucleotide
  modified_base 5: mod_base = OTHER; note = 2'-O-methyl modified nucleotide
  modified_base 6: mod_base = OTHER; note = 2'-fluoro modified nucleotide
  modified_base 7: mod_base = OTHER; note = 2'-O-methyl modified nucleotide
  modified_base 8: mod_base = OTHER; note = 2'-fluoro modified nucleotide
  modified_base 9: mod_base = OTHER; note = 2'-O-methyl modified nucleotide
  modified_base 10: mod_base = OTHER; note = 2'-fluoro modified nucleotide
  modified_base 11: mod_base = OTHER; note = 2'-O-methyl modified nucleotide
  modified_base 12: mod_base = OTHER; note = 2'-fluoro modified nucleotide
  modified_base 13: mod_base = OTHER; note = 2'-O-methyl modified nucleotide
  modified_base 14: mod_base = OTHER; note = 2'-fluoro modified nucleotide with phosphorothioate linkage
  modified_base 15: mod_base = OTHER; note = 2'-O-methyl modified nucleotide with phosphorothioate linkage
  modified_base 16: mod_base = OTHER; note = 2'-fluoro modified nucleotide with phosphorothioate linkage
  modified_base 17: mod_base = OTHER; note = 2'-O-methyl modified nucleotide with phosphorothioate linkage
  modified_base 18: mod_base = OTHER; note = 2'-fluoro modified nucleotide with phosphorothioate linkage
  misc_difference 19: note = 2'-O-methyl modified nucleotide may be attached to trivalent N-Acetylgalactosamine
ttgtagatggtcttgtctg

SEQ ID NO: 755 - RNA, 19 nt, synthetic construct
  source 1..19: mol_type = other RNA
  misc_difference 1: note = 2'-O-methyl modified nucleotide with phosphorothioate linkage may be modified with 5'-Phosphate
  modified_base 2: mod_base = OTHER; note = 2'-fluoro modified nucleotide with phosphorothioate linkage
  modified_base 3: mod_base = OTHER; note = 2'-O-methyl modified nucleotide
  modified_base 4: mod_base = OTHER; note = 2'-fluoro modified nucleotide
  modified_base 5: mod_base = OTHER; note = 2'-O-methyl modified nucleotide
  modified_base 6: mod_base = OTHER; note = 2'-fluoro modified nucleotide
  modified_base 7: mod_base = OTHER; note = 2'-O-methyl modified nucleotide
  modified_base 8: mod_base = OTHER; note = 2'-fluoro modified nucleotide
  modified_base 9: mod_base = OTHER; note = 2'-O-methyl modified nucleotide
  modified_base 10: mod_base = OTHER; note = 2'-fluoro modified nucleotide
  modified_base 11: mod_base = OTHER; note = 2'-O-methyl modified nucleotide
  modified_base 12: mod_base = OTHER; note = 2'-fluoro modified nucleotide
  modified_base 13: mod_base = OTHER; note = 2'-O-methyl modified nucleotide
  modified_base 14: mod_base = OTHER; note = 2'-fluoro modified nucleotide with phosphorothioate linkage
  modified_base 15: mod_base = OTHER; note = 2'-O-methyl modified nucleotide with phosphorothioate linkage
  modified_base 16: mod_base = OTHER; note = 2'-fluoro modified nucleotide with phosphorothioate linkage
  modified_base 17: mod_base = OTHER; note = 2'-O-methyl modified nucleotide with phosphorothioate linkage
  modified_base 18: mod_base = OTHER; note = 2'-fluoro modified nucleotide with phosphorothioate linkage
  misc_difference 19: note = 2'-O-methyl modified nucleotide may be attached to trivalent N-Acetylgalactosamine
tagagagaagaccttgacc

SEQ ID NO: 756 - RNA, 19 nt, synthetic construct
  source 1..19: mol_type = other RNA
  misc_difference 1: note = 2'-O-methyl modified nucleotide with phosphorothioate linkage may be modified with 5'-Phosphate
  modified_base 2: mod_base = OTHER; note = 2'-fluoro modified nucleotide with phosphorothioate linkage
  modified_base 3: mod_base = OTHER; note = 2'-O-methyl modified nucleotide
  modified_base 4: mod_base = OTHER; note = 2'-fluoro modified nucleotide
  modified_base 5: mod_base = OTHER; note = 2'-O-methyl modified nucleotide
  modified_base 6: mod_base = OTHER; note = 2'-fluoro modified nucleotide
  modified_base 7: mod_base = OTHER; note = 2'-O-methyl modified nucleotide
  modified_base 8: mod_base = OTHER; note = 2'-fluoro modified nucleotide
  modified_base 9: mod_base = OTHER; note = 2'-O-methyl modified nucleotide
  modified_base 10: mod_base = OTHER; note = 2'-fluoro modified nucleotide
  modified_base 11: mod_base = OTHER; note = 2'-O-methyl modified nucleotide
  modified_base 12: mod_base = OTHER; note = 2'-fluoro modified nucleotide
  modified_base 13: mod_base = OTHER; note = 2'-O-methyl modified nucleotide
  modified_base 14: mod_base = OTHER; note = 2'-fluoro modified nucleotide with phosphorothioate linkage
  modified_base 15: mod_base = OTHER; note = 2'-O-methyl modified nucleotide with phosphorothioate linkage
  modified_base 16: mod_base = OTHER; note = 2'-fluoro modified nucleotide with phosphorothioate linkage
  modified_base 17: mod_base = OTHER; note = 2'-O-methyl modified nucleotide with phosphorothioate linkage
  modified_base 18: mod_base = OTHER; note = 2'-fluoro modified nucleotide with phosphorothioate linkage
  misc_difference 19: note = 2'-O-methyl modified nucleotide may be attached to trivalent N-Acetylgalactosamine
tacacagatccctttcttg

SEQ ID NO: 757 - RNA, 19 nt, synthetic construct
  source 1..19: mol_type = other RNA
  misc_difference 1: note = 2'-O-methyl modified nucleotide with phosphorothioate linkage may be modified with 5'-Phosphate
  modified_base 2: mod_base = OTHER; note = 2'-fluoro modified nucleotide with phosphorothioate linkage
  modified_base 3: mod_base = OTHER; note = 2'-O-methyl modified nucleotide
  modified_base 4: mod_base = OTHER; note = 2'-fluoro modified nucleotide
  modified_base 5: mod_base = OTHER; note = 2'-O-methyl modified nucleotide
  modified_base 6: mod_base = OTHER; note = 2'-fluoro modified nucleotide
  modified_base 7: mod_base = OTHER; note = 2'-O-methyl modified nucleotide
  modified_base 8: mod_base = OTHER; note = 2'-fluoro modified nucleotide
  modified_base 9: mod_base = OTHER; note = 2'-O-methyl modified nucleotide
  modified_base 10: mod_base = OTHER; note = 2'-fluoro modified nucleotide
  modified_base 11: mod_base = OTHER; note = 2'-O-methyl modified nucleotide
  modified_base 12: mod_base = OTHER; note = 2'-fluoro modified nucleotide
  modified_base 13: mod_base = OTHER; note = 2'-O-methyl modified nucleotide
  modified_base 14: mod_base = OTHER; note = 2'-fluoro modified nucleotide with phosphorothioate linkage
  modified_base 15: mod_base = OTHER; note = 2'-O-methyl modified nucleotide with phosphorothioate linkage
  modified_base 16: mod_base = OTHER; note = 2'-fluoro modified nucleotide with phosphorothioate linkage
  modified_base 17: mod_base = OTHER; note = 2'-O-methyl modified nucleotide with phosphorothioate linkage
  modified_base 18: mod_base = OTHER; note = 2'-fluoro modified nucleotide with phosphorothioate linkage
  misc_difference 19: note = 2'-O-methyl modified nucleotide may be attached to trivalent N-Acetylgalactosamine
tcgaacaccatgaggtcaa

SEQ ID NO: 758 - RNA, 19 nt, synthetic construct
  source 1..19: mol_type = other RNA
  misc_difference 1: note = 2'-O-methyl modified nucleotide with phosphorothioate linkage may be modified with 5'-Phosphate
  modified_base 2: mod_base = OTHER; note = 2'-fluoro modified nucleotide with phosphorothioate linkage
  modified_base 3: mod_base = OTHER; note = 2'-O-methyl modified nucleotide
  modified_base 4: mod_base = OTHER; note = 2'-fluoro modified nucleotide
  modified_base 5: mod_base = OTHER; note = 2'-O-methyl modified nucleotide
  modified_base 6: mod_base = OTHER; note = 2'-fluoro modified nucleotide
  modified_base 7: mod_base = OTHER; note = 2'-O-methyl modified nucleotide
  modified_base 8: mod_base = OTHER; note = 2'-fluoro modified nucleotide
  modified_base 9: mod_base = OTHER; note = 2'-O-methyl modified nucleotide
  modified_base 10: mod_base = OTHER; note = 2'-fluoro modified nucleotide
  modified_base 11: mod_base = OTHER; note = 2'-O-methyl modified nucleotide
  modified_base 12: mod_base = OTHER; note = 2'-fluoro modified nucleotide
  modified_base 13: mod_base = OTHER; note = 2'-O-methyl modified nucleotide
  modified_base 14: mod_base = OTHER; note = 2'-fluoro modified nucleotide with phosphorothioate linkage
  modified_base 15: mod_base = OTHER; note = 2'-O-methyl modified nucleotide with phosphorothioate linkage
  modified_base 16: mod_base = OTHER; note = 2'-fluoro modified nucleotide with phosphorothioate linkage
  modified_base 17: mod_base = OTHER; note = 2'-O-methyl modified nucleotide with phosphorothioate linkage
  modified_base 18: mod_base = OTHER; note = 2'-fluoro modified nucleotide with phosphorothioate linkage
  misc_difference 19: note = 2'-O-methyl modified nucleotide may be attached to trivalent N-Acetylgalactosamine
taccatgaggtcaaagggc

SEQ ID NO: 759 - RNA, 19 nt, synthetic construct
  source 1..19: mol_type = other RNA
  misc_difference 1: note = 2'-O-methyl modified nucleotide with phosphorothioate linkage may be modified with 5'-Phosphate
  modified_base 2: mod_base = OTHER; note = 2'-fluoro modified nucleotide with phosphorothioate linkage
  modified_base 3: mod_base = OTHER; note = 2'-O-methyl modified nucleotide
  modified_base 4: mod_base = OTHER; note = 2'-fluoro modified nucleotide
  modified_base 5: mod_base = OTHER; note = 2'-O-methyl modified nucleotide
  modified_base 6: mod_base = OTHER; note = 2'-fluoro modified nucleotide
  modified_base 7: mod_base = OTHER; note = 2'-O-methyl modified nucleotide
  modified_base 8: mod_base = OTHER; note = 2'-fluoro modified nucleotide
  modified_base 9: mod_base = OTHER; note = 2'-O-methyl modified nucleotide
  modified_base 10: mod_base = OTHER; note = 2'-fluoro modified nucleotide
  modified_base 11: mod_base = OTHER; note = 2'-O-methyl modified nucleotide
  modified_base 12: mod_base = OTHER; note = 2'-fluoro modified nucleotide
  modified_base 13: mod_base = OTHER; note = 2'-O-methyl modified nucleotide
  modified_base 14: mod_base = OTHER; note = 2'-fluoro modified nucleotide with phosphorothioate linkage
  modified_base 15: mod_base = OTHER; note = 2'-O-methyl modified nucleotide with phosphorothioate linkage
  modified_base 16: mod_base = OTHER; note = 2'-fluoro modified nucleotide with phosphorothioate linkage
  modified_base 17: mod_base = OTHER; note = 2'-O-methyl modified nucleotide with phosphorothioate linkage
  modified_base 18: mod_base = OTHER; note = 2'-fluoro modified nucleotide with phosphorothioate linkage
  misc_difference 19: note = 2'-O-methyl modified nucleotide may be attached to trivalent N-Acetylgalactosamine
tagaccttgaccacgtagg

SEQ ID NO: 760 - RNA, 19 nt, synthetic construct
  source 1..19: mol_type = other RNA
  misc_difference 1: note = 2'-O-methyl modified nucleotide with phosphorothioate linkage may be modified with 5'-Phosphate
  modified_base 2: mod_base = OTHER; note = 2'-fluoro modified nucleotide with phosphorothioate linkage
  modified_base 3: mod_base = OTHER; note = 2'-O-methyl modified nucleotide
  modified_base 4: mod_base = OTHER; note = 2'-fluoro modified nucleotide
  modified_base 5: mod_base = OTHER; note = 2'-O-methyl modified nucleotide
  modified_base 6: mod_base = OTHER; note = 2'-fluoro modified nucleotide
  modified_base 7: mod_base = OTHER; note = 2'-O-methyl modified nucleotide
  modified_base 8: mod_base = OTHER; note = 2'-fluoro modified nucleotide
  modified_base 9: mod_base = OTHER; note = 2'-O-methyl modified nucleotide
  modified_base 10: mod_base = OTHER; note = 2'-fluoro modified nucleotide
  modified_base 11: mod_base = OTHER; note = 2'-O-methyl modified nucleotide
  modified_base 12: mod_base = OTHER; note = 2'-fluoro modified nucleotide
  modified_base 13: mod_base = OTHER; note = 2'-O-methyl modified nucleotide
  modified_base 14: mod_base = OTHER; note = 2'-fluoro modified nucleotide with phosphorothioate linkage
  modified_base 15: mod_base = OTHER; note = 2'-O-methyl modified nucleotide with phosphorothioate linkage
  modified_base 16: mod_base = OTHER; note = 2'-fluoro modified nucleotide with phosphorothioate linkage
  modified_base 17: mod_base = OTHER; note = 2'-O-methyl modified nucleotide with phosphorothioate linkage
  modified_base 18: mod_base = OTHER; note = 2'-fluoro modified nucleotide with phosphorothioate linkage
  misc_difference 19: note = 2'-O-methyl modified nucleotide may be attached to trivalent N-Acetylgalactosamine
tcaccatgaggtcaaaggg

SEQ ID NO: 761 - RNA, 19 nt, synthetic construct
  source 1..19: mol_type = other RNA
  misc_difference 1: note = 2'-O-methyl modified nucleotide with phosphorothioate linkage may be modified with 5'-Phosphate
  modified_base 2: mod_base = OTHER; note = 2'-fluoro modified nucleotide with phosphorothioate linkage
  modified_base 3: mod_base = OTHER; note = 2'-O-methyl modified nucleotide
  modified_base 4: mod_base = OTHER; note = 2'-fluoro modified nucleotide
  modified_base 5: mod_base = OTHER; note = 2'-O-methyl modified nucleotide
  modified_base 6: mod_base = OTHER; note = 2'-fluoro modified nucleotide
  modified_base 7: mod_base = OTHER; note = 2'-O-methyl modified nucleotide
  modified_base 8: mod_base = OTHER; note = 2'-fluoro modified nucleotide
  modified_base 9: mod_base = OTHER; note = 2'-O-methyl modified nucleotide
  modified_base 10: mod_base = OTHER; note = 2'-fluoro modified nucleotide
  modified_base 11: mod_base = OTHER; note = 2'-O-methyl modified nucleotide
  modified_base 12: mod_base = OTHER; note = 2'-fluoro modified nucleotide
  modified_base 13: mod_base = OTHER; note = 2'-O-methyl modified nucleotide
  modified_base 14: mod_base = OTHER; note = 2'-fluoro modified nucleotide with phosphorothioate linkage
  modified_base 15: mod_base = OTHER; note = 2'-O-methyl modified nucleotide with phosphorothioate linkage
  modified_base 16: mod_base = OTHER; note = 2'-fluoro modified nucleotide with phosphorothioate linkage
  modified_base 17: mod_base = OTHER; note = 2'-O-methyl modified nucleotide with phosphorothioate linkage
  modified_base 18: mod_base = OTHER; note = 2'-fluoro modified nucleotide with phosphorothioate linkage
  misc_difference 19: note = 2'-O-methyl modified nucleotide may be attached to trivalent N-Acetylgalactosamine
taacaccatgaggtcaaag

SEQ ID NO: 762 - RNA, 19 nt, synthetic construct
  source 1..19: mol_type = other RNA
  misc_difference 1: note = 2'-O-methyl modified nucleotide with phosphorothioate linkage may be modified with 5'-Phosphate
  modified_base 2: mod_base = OTHER; note = 2'-fluoro modified nucleotide with phosphorothioate linkage
  modified_base 3: mod_base = OTHER; note = 2'-O-methyl modified nucleotide
  modified_base 4: mod_base = OTHER; note = 2'-fluoro modified nucleotide
  modified_base 5: mod_base = OTHER; note = 2'-O-methyl modified nucleotide
  modified_base 6: mod_base = OTHER; note = 2'-fluoro modified nucleotide
  modified_base 7: mod_base = OTHER; note = 2'-O-methyl modified nucleotide
  modified_base 8: mod_base = OTHER; note = 2'-fluoro modified nucleotide
  modified_base 9: mod_base = OTHER; note = 2'-O-methyl modified nucleotide
  modified_base 10: mod_base = OTHER; note = 2'-fluoro modified nucleotide
  modified_base 11: mod_base = OTHER; note = 2'-O-methyl modified nucleotide
  modified_base 12: mod_base = OTHER; note = 2'-fluoro modified nucleotide
  modified_base 13: mod_base = OTHER; note = 2'-O-methyl modified nucleotide
  modified_base 14: mod_base = OTHER; note = 2'-fluoro modified nucleotide with phosphorothioate linkage
  modified_base 15: mod_base = OTHER; note = 2'-O-methyl modified nucleotide with phosphorothioate linkage
  modified_base 16: mod_base = OTHER; note = 2'-fluoro modified nucleotide with phosphorothioate linkage
  modified_base 17: mod_base = OTHER; note = 2'-O-methyl modified nucleotide with phosphorothioate linkage
  modified_base 18: mod_base = OTHER; note = 2'-fluoro modified nucleotide with phosphorothioate linkage
  misc_difference 19: note = 2'-O-methyl modified nucleotide may be attached to trivalent N-Acetylgalactosamine
taagaccttgaccacgtag

SEQ ID NO: 763 - RNA, 19 nt, synthetic construct
  source 1..19: mol_type = other RNA
  misc_difference 1: note = 2'-O-methyl modified nucleotide with phosphorothioate linkage may be modified with 5'-Phosphate
  modified_base 2: mod_base = OTHER; note = 2'-fluoro modified nucleotide with phosphorothioate linkage
  modified_base 3: mod_base = OTHER; note = 2'-O-methyl modified nucleotide
  modified_base 4: mod_base = OTHER; note = 2'-fluoro modified nucleotide
  modified_base 5: mod_base = OTHER; note = 2'-O-methyl modified nucleotide
  modified_base 6: mod_base = OTHER; note = 2'-fluoro modified nucleotide
  modified_base 7: mod_base = OTHER; note = 2'-O-methyl modified nucleotide
  modified_base 8: mod_base = OTHER; note = 2'-fluoro modified nucleotide
  modified_base 9: mod_base = OTHER; note = 2'-O-methyl modified nucleotide
  modified_base 10: mod_base = OTHER; note = 2'-fluoro modified nucleotide
  modified_base 11: mod_base = OTHER; note = 2'-O-methyl modified nucleotide
  modified_base 12: mod_base = OTHER; note = 2'-fluoro modified nucleotide
  modified_base 13: mod_base = OTHER; note = 2'-O-methyl modified nucleotide
  modified_base 14: mod_base = OTHER; note = 2'-fluoro modified nucleotide with phosphorothioate linkage
  modified_base 15: mod_base = OTHER; note = 2'-O-methyl modified nucleotide with phosphorothioate linkage
  modified_base 16: mod_base = OTHER; note = 2'-fluoro modified nucleotide with phosphorothioate linkage
  modified_base 17: mod_base = OTHER; note = 2'-O-methyl modified nucleotide with phosphorothioate linkage
  modified_base 18: mod_base = OTHER; note = 2'-fluoro modified nucleotide with phosphorothioate linkage
  misc_difference 19: note = 2'-O-methyl modified nucleotide may be attached to trivalent N-Acetylgalactosamine
tagaagaccttgaccacgt

SEQ ID NO: 764 - RNA, 19 nt, synthetic construct
  source 1..19: mol_type = other RNA
  misc_difference 1: note = 2'-O-methyl modified nucleotide with phosphorothioate linkage may be modified with 5'-Phosphate
  modified_base 2: mod_base = OTHER; note = 2'-fluoro modified nucleotide with phosphorothioate linkage
  modified_base 3: mod_base = OTHER; note = 2'-O-methyl modified nucleotide
  modified_base 4: mod_base = OTHER; note = 2'-fluoro modified nucleotide
  modified_base 5: mod_base = OTHER; note = 2'-O-methyl modified nucleotide
  modified_base 6: mod_base = OTHER; note = 2'-fluoro modified nucleotide
  modified_base 7: mod_base = OTHER; note = 2'-O-methyl modified nucleotide
  modified_base 8: mod_base = OTHER; note = 2'-fluoro modified nucleotide
  modified_base 9: mod_base = OTHER; note = 2'-O-methyl modified nucleotide
  modified_base 10: mod_base = OTHER; note = 2'-fluoro modified nucleotide
  modified_base 11: mod_base = OTHER; note = 2'-O-methyl modified nucleotide
  modified_base 12: mod_base = OTHER; note = 2'-fluoro modified nucleotide
  modified_base 13: mod_base = OTHER; note = 2'-O-methyl modified nucleotide
  modified_base 14: mod_base = OTHER; note = 2'-fluoro modified nucleotide with phosphorothioate linkage
  modified_base 15: mod_base = OTHER; note = 2'-O-methyl modified nucleotide with phosphorothioate linkage
  modified_base 16: mod_base = OTHER; note = 2'-fluoro modified nucleotide with phosphorothioate linkage
  modified_base 17: mod_base = OTHER; note = 2'-O-methyl modified nucleotide with phosphorothioate linkage
  modified_base 18: mod_base = OTHER; note = 2'-fluoro modified nucleotide with phosphorothioate linkage
  misc_difference 19: note = 2'-O-methyl modified nucleotide may be attached to trivalent N-Acetylgalactosamine
tggtcttgtacacatagtc

SEQ ID NO: 765 - RNA, 19 nt, synthetic construct
  source 1..19: mol_type = other RNA
  misc_difference 1: note = 2'-O-methyl modified nucleotide with phosphorothioate linkage may be modified with 5'-Phosphate
  modified_base 2: mod_base = OTHER; note = 2'-fluoro modified nucleotide with phosphorothioate linkage
  modified_base 3: mod_base = OTHER; note = 2'-O-methyl modified nucleotide
  modified_base 4: mod_base = OTHER; note = 2'-fluoro modified nucleotide
  modified_base 5: mod_base = OTHER; note = 2'-O-methyl modified nucleotide
  modified_base 6: mod_base = OTHER; note = 2'-fluoro modified nucleotide
  modified_base 7: mod_base = OTHER; note = 2'-O-methyl modified nucleotide
  modified_base 8: mod_base = OTHER; note = 2'-fluoro modified nucleotide
  modified_base 9: mod_base = OTHER; note = 2'-O-methyl modified nucleotide
  modified_base 10: mod_base = OTHER; note = 2'-fluoro modified nucleotide
  modified_base 11: mod_base = OTHER; note = 2'-O-methyl modified nucleotide
  modified_base 12: mod_base = OTHER; note = 2'-fluoro modified nucleotide
  modified_base 13: mod_base = OTHER; note = 2'-O-methyl modified nucleotide
  modified_base 14: mod_base = OTHER; note = 2'-fluoro modified nucleotide with phosphorothioate linkage
  modified_base 15: mod_base = OTHER; note = 2'-O-methyl modified nucleotide with phosphorothioate linkage
  modified_base 16: mod_base = OTHER; note = 2'-fluoro modified nucleotide with phosphorothioate linkage
  modified_base 17: mod_base = OTHER; note = 2'-O-methyl modified nucleotide with phosphorothioate linkage
  modified_base 18: mod_base = OTHER; note = 2'-fluoro modified nucleotide with phosphorothioate linkage
  misc_difference 19: note = 2'-O-methyl modified nucleotide may be attached to trivalent N-Acetylgalactosamine
tccatgaggtcaaagggca

SEQ ID NO: 766 - RNA, 19 nt, synthetic construct
  source 1..19: mol_type = other RNA
  misc_difference 1: note = 2'-O-methyl modified nucleotide with phosphorothioate linkage may be modified with 5'-Phosphate
  modified_base 2: mod_base = OTHER; note = 2'-fluoro modified nucleotide with phosphorothioate linkage
  modified_base 3: mod_base = OTHER; note = 2'-O-methyl modified nucleotide
  modified_base 4: mod_base = OTHER; note = 2'-fluoro modified nucleotide
  modified_base 5: mod_base = OTHER; note = 2'-O-methyl modified nucleotide
  modified_base 6: mod_base = OTHER; note = 2'-fluoro modified nucleotide
  modified_base 7: mod_base = OTHER; note = 2'-O-methyl modified nucleotide
  modified_base 8: mod_base = OTHER; note = 2'-fluoro modified nucleotide
  modified_base 9: mod_base = OTHER; note = 2'-O-methyl modified nucleotide
  modified_base 10: mod_base = OTHER; note = 2'-fluoro modified nucleotide
  modified_base 11: mod_base = OTHER; note = 2'-O-methyl modified nucleotide
  modified_base 12: mod_base = OTHER; note = 2'-fluoro modified nucleotide
  modified_base 13: mod_base = OTHER; note = 2'-O-methyl modified nucleotide
  modified_base 14: mod_base = OTHER; note = 2'-fluoro modified nucleotide with phosphorothioate linkage
  modified_base 15: mod_base = OTHER; note = 2'-O-methyl modified nucleotide with phosphorothioate linkage
  modified_base 16: mod_base = OTHER; note = 2'-fluoro modified nucleotide with phosphorothioate linkage
  modified_base 17: mod_base = OTHER; note = 2'-O-methyl modified nucleotide with phosphorothioate linkage
  modified_base 18: mod_base = OTHER; note = 2'-fluoro modified nucleotide with phosphorothioate linkage
  misc_difference 19: note = 2'-O-methyl modified nucleotide may be attached to trivalent N-Acetylgalactosamine
tcatgaggtcaaagggcat

SEQ ID NO: 767 - RNA, 19 nt, synthetic construct
  source 1..19: mol_type = other RNA
  misc_difference 1: note = 2'-O-methyl modified nucleotide with phosphorothioate linkage may be modified with 5'-Phosphate
  modified_base 2: mod_base = OTHER; note = 2'-fluoro modified nucleotide with phosphorothioate linkage
  modified_base 3: mod_base = OTHER; note = 2'-O-methyl modified nucleotide
  modified_base 4: mod_base = OTHER; note = 2'-fluoro modified nucleotide
  modified_base 5: mod_base = OTHER; note = 2'-O-methyl modified nucleotide
  modified_base 6: mod_base = OTHER; note = 2'-fluoro modified nucleotide
  modified_base 7: mod_base = OTHER; note = 2'-O-methyl modified nucleotide
  modified_base 8: mod_base = OTHER; note = 2'-fluoro modified nucleotide
  modified_base 9: mod_base = OTHER; note = 2'-O-methyl modified nucleotide
  modified_base 10: mod_base = OTHER; note = 2'-fluoro modified nucleotide
  modified_base 11: mod_base = OTHER; note = 2'-O-methyl modified nucleotide
  modified_base 12: mod_base = OTHER; note = 2'-fluoro modified nucleotide
  modified_base 13: mod_base = OTHER; note = 2'-O-methyl modified nucleotide
  modified_base 14: mod_base = OTHER; note = 2'-fluoro modified nucleotide with phosphorothioate linkage
  modified_base 15: mod_base = OTHER; note = 2'-O-methyl modified nucleotide with phosphorothioate linkage
  modified_base 16: mod_base = OTHER; note = 2'-fluoro modified nucleotide with phosphorothioate linkage
  modified_base 17: mod_base = OTHER; note = 2'-O-methyl modified nucleotide with phosphorothioate linkage
  modified_base 18: mod_base = OTHER; note = 2'-fluoro modified nucleotide with phosphorothioate linkage
  misc_difference 19: note = 2'-O-methyl modified nucleotide may be attached to trivalent N-Acetylgalactosamine
tggagaattctggtctcag

SEQ ID NO: 768 - RNA, 19 nt, synthetic construct
  source 1..19: mol_type = other RNA
  misc_difference 1: note = 2'-O-methyl modified nucleotide with phosphorothioate linkage may be modified with 5'-Phosphate
  modified_base 2: mod_base = OTHER; note = 2'-fluoro modified nucleotide with phosphorothioate linkage
  modified_base 3: mod_base = OTHER; note = 2'-O-methyl modified nucleotide
  modified_base 4: mod_base = OTHER; note = 2'-fluoro modified nucleotide
  modified_base 5: mod_base = OTHER; note = 2'-O-methyl modified nucleotide
  modified_base 6: mod_base = OTHER; note = 2'-fluoro modified nucleotide
  modified_base 7: mod_base = OTHER; note = 2'-O-methyl modified nucleotide
  modified_base 8: mod_base = OTHER; note = 2'-fluoro modified nucleotide
  modified_base 9: mod_base = OTHER; note = 2'-O-methyl modified nucleotide
  modified_base 10: mod_base = OTHER; note = 2'-fluoro modified nucleotide
  modified_base 11: mod_base = OTHER; note = 2'-O-methyl modified nucleotide
  modified_base 12: mod_base = OTHER; note = 2'-fluoro modified nucleotide
  modified_base 13: mod_base = OTHER; note = 2'-O-methyl modified nucleotide
  modified_base 14: mod_base = OTHER; note = 2'-fluoro modified nucleotide with phosphorothioate linkage
  modified_base 15: mod_base = OTHER; note = 2'-O-methyl modified nucleotide with phosphorothioate linkage
  modified_base 16: mod_base = OTHER; note = 2'-fluoro modified nucleotide with phosphorothioate linkage
  modified_base 17: mod_base = OTHER; note = 2'-O-methyl modified nucleotide with phosphorothioate linkage
  modified_base 18: mod_base = OTHER; note = 2'-fluoro modified nucleotide with phosphorothioate linkage
  misc_difference 19: note = 2'-O-methyl modified nucleotide may be attached to trivalent N-Acetylgalactosamine
tggtattgagccaaggctt

SEQ ID NO: 769 - RNA, 19 nt, synthetic construct
  source 1..19: mol_type = other RNA
  misc_difference 1: note = 2'-O-methyl modified nucleotide with phosphorothioate linkage may be modified with 5'-Phosphate
  modified_base 2: mod_base = OTHER; note = 2'-fluoro modified nucleotide with phosphorothioate linkage
  modified_base 3: mod_base = OTHER; note = 2'-O-methyl modified nucleotide
  modified_base 4: mod_base = OTHER; note = 2'-fluoro modified nucleotide
  modified_base 5: mod_base = OTHER; note = 2'-O-methyl modified nucleotide
  modified_base 6: mod_base = OTHER; note = 2'-fluoro modified nucleotide
  modified_base 7: mod_base = OTHER; note = 2'-O-methyl modified nucleotide
  modified_base 8: mod_base = OTHER; note = 2'-fluoro modified nucleotide
  modified_base 9: mod_base = OTHER; note = 2'-O-methyl modified nucleotide
  modified_base 10: mod_base = OTHER; note = 2'-fluoro modified nucleotide
  modified_base 11: mod_base = OTHER; note = 2'-O-methyl modified nucleotide
  modified_base 12: mod_base = OTHER; note = 2'-fluoro modified nucleotide
  modified_base 13: mod_base = OTHER; note = 2'-O-methyl modified nucleotide
  modified_base 14: mod_base = OTHER; note = 2'-fluoro modified nucleotide with phosphorothioate linkage
  modified_base 15: mod_base = OTHER; note = 2'-O-methyl modified nucleotide with phosphorothioate linkage
  modified_base 16: mod_base = OTHER; note = 2'-fluoro modified nucleotide with phosphorothioate linkage
  modified_base 17: mod_base = OTHER; note = 2'-O-methyl modified nucleotide with phosphorothioate linkage
  modified_base 18: mod_base = OTHER; note = 2'-fluoro modified nucleotide with phosphorothioate linkage
  misc_difference 19: note = 2'-O-methyl modified nucleotide may be attached to trivalent N-Acetylgalactosamine
tcagccagagagaagacct

SEQ ID NO: 770 - RNA, 19 nt, synthetic construct
  source 1..19: mol_type = other RNA
  misc_difference 1: note = 2'-O-methyl modified nucleotide with phosphorothioate linkage may be modified with 5'-Phosphate
  modified_base 2: mod_base = OTHER; note = 2'-fluoro modified nucleotide with phosphorothioate linkage
  modified_base 3: mod_base = OTHER; note = 2'-O-methyl modified nucleotide
  modified_base 4: mod_base = OTHER; note = 2'-fluoro modified nucleotide
  modified_base 5: mod_base = OTHER; note = 2'-O-methyl modified nucleotide
  modified_base 6: mod_base = OTHER; note = 2'-fluoro modified nucleotide
  modified_base 7: mod_base = OTHER; note = 2'-O-methyl modified nucleotide
  modified_base 8: mod_base = OTHER; note = 2'-fluoro modified nucleotide
  modified_base 9: mod_base = OTHER; note = 2'-O-methyl modified nucleotide
  modified_base 10: mod_base = OTHER; note = 2'-fluoro modified nucleotide
  modified_base 11: mod_base = OTHER; note = 2'-O-methyl modified nucleotide
  modified_base 12: mod_base = OTHER; note = 2'-fluoro modified nucleotide
  modified_base 13: mod_base = OTHER; note = 2'-O-methyl modified nucleotide
  modified_base 14: mod_base = OTHER; note = 2'-fluoro modified nucleotide with phosphorothioate linkage
  modified_base 15: mod_base = OTHER; note = 2'-O-methyl modified nucleotide with phosphorothioate linkage
  modified_base 16: mod_base = OTHER; note = 2'-fluoro modified nucleotide with phosphorothioate linkage
  modified_base 17: mod_base = OTHER; note = 2'-O-methyl modified nucleotide with phosphorothioate linkage
  modified_base 18: mod_base = OTHER; note = 2'-fluoro modified nucleotide with phosphorothioate linkage
  misc_difference 19: note = 2'-O-methyl modified nucleotide may be attached to trivalent N-Acetylgalactosamine
tgaaactgggcagcacgta

SEQ ID NO: 771 - RNA, 19 nt, synthetic construct
  source 1..19: mol_type = other RNA
  misc_difference 1: note = 2'-O-methyl modified nucleotide with phosphorothioate linkage may be modified with 5'-Phosphate
  modified_base 2: mod_base = OTHER; note = 2'-fluoro modified nucleotide with phosphorothioate linkage
  modified_base 3: mod_base = OTHER; note = 2'-O-methyl modified nucleotide
  modified_base 4: mod_base = OTHER; note = 2'-fluoro modified nucleotide
  modified_base 5: mod_base = OTHER; note = 2'-O-methyl modified nucleotide
  modified_base 6: mod_base = OTHER; note = 2'-fluoro modified nucleotide
  modified_base 7: mod_base = OTHER; note = 2'-O-methyl modified nucleotide
  modified_base 8: mod_base = OTHER; note = 2'-fluoro modified nucleotide
  modified_base 9: mod_base = OTHER; note = 2'-O-methyl modified nucleotide
  modified_base 10: mod_base = OTHER; note = 2'-fluoro modified nucleotide
  modified_base 11: mod_base = OTHER; note = 2'-O-methyl modified nucleotide
  modified_base 12: mod_base = OTHER; note = 2'-fluoro modified nucleotide
  modified_base 13: mod_base = OTHER; note = 2'-O-methyl modified nucleotide
  modified_base 14: mod_base = OTHER; note = 2'-fluoro modified nucleotide with phosphorothioate linkage
  modified_base 15: mod_base = OTHER; note = 2'-O-methyl modified nucleotide with phosphorothioate linkage
  modified_base 16: mod_base = OTHER; note = 2'-fluoro modified nucleotide with phosphorothioate linkage
  modified_base 17: mod_base = OTHER; note = 2'-O-methyl modified nucleotide with phosphorothioate linkage
  modified_base 18: mod_base = OTHER; note = 2'-fluoro modified nucleotide with phosphorothioate linkage
  misc_difference 19: note = 2'-O-methyl modified nucleotide may be attached to trivalent N-Acetylgalactosamine
tatttctctgtaggctcca

SEQ ID NO: 772 - RNA, 19 nt, synthetic construct
  source 1..19: mol_type = other RNA
  misc_difference 1: note = 2'-O-methyl modified nucleotide with phosphorothioate linkage may be modified with 5'-Phosphate
  modified_base 2: mod_base = OTHER; note = 2'-fluoro modified nucleotide with phosphorothioate linkage
  modified_base 3: mod_base = OTHER; note = 2'-O-methyl modified nucleotide
  modified_base 4: mod_base = OTHER; note = 2'-fluoro modified nucleotide
  modified_base 5: mod_base = OTHER; note = 2'-O-methyl modified nucleotide
  modified_base 6: mod_base = OTHER; note = 2'-fluoro modified nucleotide
  modified_base 7: mod_base = OTHER; note = 2'-O-methyl modified nucleotide
  modified_base 8: mod_base = OTHER; note = 2'-fluoro modified nucleotide
  modified_base 9: mod_base = OTHER; note = 2'-O-methyl modified nucleotide
  modified_base 10: mod_base = OTHER; note = 2'-fluoro modified nucleotide
  modified_base 11: mod_base = OTHER; note = 2'-O-methyl modified nucleotide
  modified_base 12: mod_base = OTHER; note = 2'-fluoro modified nucleotide
  modified_base 13: mod_base = OTHER; note = 2'-O-methyl modified nucleotide
  modified_base 14: mod_base = OTHER; note = 2'-fluoro modified nucleotide with phosphorothioate linkage
  modified_base 15: mod_base = OTHER; note = 2'-O-methyl modified nucleotide with phosphorothioate linkage
  modified_base 16: mod_base = OTHER; note = 2'-fluoro modified nucleotide with phosphorothioate linkage
  modified_base 17: mod_base = OTHER; note = 2'-O-methyl modified nucleotide with phosphorothioate linkage
  modified_base 18: mod_base = OTHER; note = 2'-fluoro modified nucleotide with phosphorothioate linkage
  misc_difference 19: note = 2'-O-methyl modified nucleotide may be attached to trivalent N-Acetylgalactosamine
ttgccttggccttttcctt

SEQ ID NO: 773 - RNA, 19 nt, synthetic construct
  source 1..19: mol_type = other RNA
  misc_difference 1: note = 2'-O-methyl modified nucleotide with phosphorothioate linkage may be modified with 5'-Phosphate
  modified_base 2: mod_base = OTHER; note = 2'-fluoro modified nucleotide with phosphorothioate linkage
  modified_base 3: mod_base = OTHER; note = 2'-O-methyl modified nucleotide
  modified_base 4: mod_base = OTHER; note = 2'-fluoro modified nucleotide
  modified_base 5: mod_base = OTHER; note = 2'-O-methyl modified nucleotide
  modified_base 6: mod_base = OTHER; note = 2'-fluoro modified nucleotide
  modified_base 7: mod_base = OTHER; note = 2'-O-methyl modified nucleotide
  modified_base 8: mod_base = OTHER; note = 2'-fluoro modified nucleotide
  modified_base 9: mod_base = OTHER; note = 2'-O-methyl modified nucleotide
  modified_base 10: mod_base = OTHER; note = 2'-fluoro modified nucleotide
  modified_base 11: mod_base = OTHER; note = 2'-O-methyl modified nucleotide
  modified_base 12: mod_base = OTHER; note = 2'-fluoro modified nucleotide
  modified_base 13: mod_base = OTHER; note = 2'-O-methyl modified nucleotide
  modified_base 14: mod_base = OTHER; note = 2'-fluoro modified nucleotide with phosphorothioate linkage
  modified_base 15: mod_base = OTHER; note = 2'-O-methyl modified nucleotide with phosphorothioate linkage
  modified_base 16: mod_base = OTHER; note = 2'-fluoro modified nucleotide with phosphorothioate linkage
  modified_base 17: mod_base = OTHER; note = 2'-O-methyl modified nucleotide with phosphorothioate linkage
  modified_base 18: mod_base = OTHER; note = 2'-fluoro modified nucleotide with phosphorothioate linkage
  misc_difference 19: note = 2'-O-methyl modified nucleotide may be attached to trivalent N-Acetylgalactosamine
tcagagagaagaccttgac

SEQ ID NO: 774 - RNA, 19 nt, synthetic construct
  source 1..19: mol_type = other RNA
  misc_difference 1: note = 2'-O-methyl modified nucleotide with phosphorothioate linkage may be modified with 5'-Phosphate
  modified_base 2: mod_base = OTHER; note = 2'-fluoro modified nucleotide with phosphorothioate linkage
  modified_base 3: mod_base = OTHER; note = 2'-O-methyl modified nucleotide
  modified_base 4: mod_base = OTHER; note = 2'-fluoro modified nucleotide
  modified_base 5: mod_base = OTHER; note = 2'-O-methyl modified nucleotide
  modified_base 6: mod_base = OTHER; note = 2'-fluoro modified nucleotide
  modified_base 7: mod_base = OTHER; note = 2'-O-methyl modified nucleotide
  modified_base 8: mod_base = OTHER; note = 2'-fluoro modified nucleotide
  modified_base 9: mod_base = OTHER; note = 2'-O-methyl modified nucleotide
  modified_base 10: mod_base = OTHER; note = 2'-fluoro modified nucleotide
  modified_base 11: mod_base = OTHER; note = 2'-O-methyl modified nucleotide
  modified_base 12: mod_base = OTHER; note = 2'-fluoro modified nucleotide
  modified_base 13: mod_base = OTHER; note = 2'-O-methyl modified nucleotide
  modified_base 14: mod_base = OTHER; note = 2'-fluoro modified nucleotide with phosphorothioate linkage
  modified_base 15: mod_base = OTHER; note = 2'-O-methyl modified nucleotide with phosphorothioate linkage
  modified_base 16: mod_base = OTHER; note = 2'-fluoro modified nucleotide with phosphorothioate linkage
  modified_base 17: mod_base = OTHER; note = 2'-O-methyl modified nucleotide with phosphorothioate linkage
  modified_base 18: mod_base = OTHER; note = 2'-fluoro modified nucleotide with phosphorothioate linkage
  misc_difference 19: note = 2'-O-methyl modified nucleotide may be attached to trivalent N-Acetylgalactosamine
taatttctctgtaggctcc

SEQ ID NO: 775 - RNA, 19 nt, synthetic construct
  source 1..19: mol_type = other RNA
  misc_difference 1: note = 2'-O-methyl modified nucleotide with phosphorothioate linkage may be modified with 5'-Phosphate
  modified_base 2: mod_base = OTHER; note = 2'-fluoro modified nucleotide with phosphorothioate linkage
  modified_base 3: mod_base = OTHER; note = 2'-O-methyl modified nucleotide
  modified_base 4: mod_base = OTHER; note = 2'-fluoro modified nucleotide
  modified_base 5: mod_base = OTHER; note = 2'-O-methyl modified nucleotide
  modified_base 6: mod_base = OTHER; note = 2'-fluoro modified nucleotide
  modified_base 7: mod_base = OTHER; note = 2'-O-methyl modified nucleotide
  modified_base 8: mod_base = OTHER; note = 2'-fluoro modified nucleotide
  modified_base 9: mod_base = OTHER; note = 2'-O-methyl modified nucleotide
  modified_base 10: mod_base = OTHER; note = 2'-fluoro modified nucleotide
  modified_base 11: mod_base = OTHER; note = 2'-O-methyl modified nucleotide
  modified_base 12: mod_base = OTHER; note = 2'-fluoro modified nucleotide
  modified_base 13: mod_base = OTHER; note = 2'-O-methyl modified nucleotide
  modified_base 14: mod_base = OTHER; note = 2'-fluoro modified nucleotide with phosphorothioate linkage
  modified_base 15: mod_base = OTHER; note = 2'-O-methyl modified nucleotide with phosphorothioate linkage
  modified_base 16: mod_base = OTHER; note = 2'-fluoro modified nucleotide with phosphorothioate linkage
  modified_base 17: mod_base = OTHER; note = 2'-O-methyl modified nucleotide with phosphorothioate linkage
  modified_base 18: mod_base = OTHER; note = 2'-fluoro modified nucleotide with phosphorothioate linkage
  misc_difference 19: note = 2'-O-methyl modified nucleotide may be attached to trivalent N-Acetylgalactosamine
ttttctctgtaggctccac

SEQ ID NO: 776 - RNA, 19 nt, synthetic construct
  source 1..19: mol_type = other RNA
  misc_difference 1: note = 2'-O-methyl modified nucleotide with phosphorothioate linkage may be modified with 5'-Phosphate
  modified_base 2: mod_base = OTHER; note = 2'-fluoro modified nucleotide with phosphorothioate linkage
  modified_base 3: mod_base = OTHER; note = 2'-O-methyl modified nucleotide
  modified_base 4: mod_base = OTHER; note = 2'-fluoro modified nucleotide
  modified_base 5: mod_base = OTHER; note = 2'-O-methyl modified nucleotide
  modified_base 6: mod_base = OTHER; note = 2'-fluoro modified nucleotide
  modified_base 7: mod_base = OTHER; note = 2'-O-methyl modified nucleotide
  modified_base 8: mod_base = OTHER; note = 2'-fluoro modified nucleotide
  modified_base 9: mod_base = OTHER; note = 2'-O-methyl modified nucleotide
  modified_base 10: mod_base = OTHER; note = 2'-fluoro modified nucleotide
  modified_base 11: mod_base = OTHER; note = 2'-O-methyl modified nucleotide
  modified_base 12: mod_base = OTHER; note = 2'-fluoro modified nucleotide
  modified_base 13: mod_base = OTHER; note = 2'-O-methyl modified nucleotide
  modified_base 14: mod_base = OTHER; note = 2'-fluoro modified nucleotide with phosphorothioate linkage
  modified_base 15: mod_base = OTHER; note = 2'-O-methyl modified nucleotide with phosphorothioate linkage
  modified_base 16: mod_base = OTHER; note = 2'-fluoro modified nucleotide with phosphorothioate linkage
  modified_base 17: mod_base = OTHER; note = 2'-O-methyl modified nucleotide with phosphorothioate linkage
  modified_base 18: mod_base = OTHER; note = 2'-fluoro modified nucleotide with phosphorothioate linkage
  misc_difference 19: note = 2'-O-methyl modified nucleotide may be attached to trivalent N-Acetylgalactosamine
tgggccagtgctccaccca

SEQ ID NO: 777 - RNA, 19 nt, synthetic construct
  source 1..19: mol_type = other RNA
  misc_difference 1: note = 2'-O-methyl modified nucleotide with phosphorothioate linkage may be modified with 5'-Phosphate
  modified_base 2: mod_base = OTHER; note = 2'-fluoro modified nucleotide with phosphorothioate linkage
  modified_base 3: mod_base = OTHER; note = 2'-O-methyl modified nucleotide
  modified_base 4: mod_base = OTHER; note = 2'-fluoro modified nucleotide
  modified_base 5: mod_base = OTHER; note = 2'-O-methyl modified nucleotide
  modified_base 6: mod_base = OTHER; note = 2'-fluoro modified nucleotide
  modified_base 7: mod_base = OTHER; note = 2'-O-methyl modified nucleotide
  modified_base 8: mod_base = OTHER; note = 2'-fluoro modified nucleotide
  modified_base 9: mod_base = OTHER; note = 2'-O-methyl modified nucleotide
  modified_base 10: mod_base = OTHER; note = 2'-fluoro modified nucleotide
  modified_base 11: mod_base = OTHER; note = 2'-O-methyl modified nucleotide
  modified_base 12: mod_base = OTHER; note = 2'-fluoro modified nucleotide
  modified_base 13: mod_base = OTHER; note = 2'-O-methyl modified nucleotide
  modified_base 14: mod_base = OTHER; note = 2'-fluoro modified nucleotide with phosphorothioate linkage
  modified_base 15: mod_base = OTHER; note = 2'-O-methyl modified nucleotide with phosphorothioate linkage
  modified_base 16: mod_base = OTHER; note = 2'-fluoro modified nucleotide with phosphorothioate linkage
  modified_base 17: mod_base = OTHER; note = 2'-O-methyl modified nucleotide with phosphorothioate linkage
  modified_base 18: mod_base = OTHER; note = 2'-fluoro modified nucleotide with phosphorothioate linkage
  misc_difference 19: note = 2'-O-methyl modified nucleotide may be attached to trivalent N-Acetylgalactosamine
tgacatagtggcatcctgg

SEQ ID NO: 778 - RNA, 19 nt, synthetic construct
  source 1..19: mol_type = other RNA
  misc_difference 1: note = 2'-O-methyl modified nucleotide with phosphorothioate linkage may be modified with 5'-Phosphate
  modified_base 2: mod_base = OTHER; note = 2'-fluoro modified nucleotide with phosphorothioate linkage
  modified_base 3: mod_base = OTHER; note = 2'-O-methyl modified nucleotide
  modified_base 4: mod_base = OTHER; note = 2'-fluoro modified nucleotide
  modified_base 5: mod_base = OTHER; note = 2'-O-methyl modified nucleotide
  modified_base 6: mod_base = OTHER; note = 2'-fluoro modified nucleotide
  modified_base 7: mod_base = OTHER; note = 2'-O-methyl modified nucleotide
  modified_base 8: mod_base = OTHER; note = 2'-fluoro modified nucleotide
  modified_base 9: mod_base = OTHER; note = 2'-O-methyl modified nucleotide
  modified_base 10: mod_base = OTHER; note = 2'-fluoro modified nucleotide
  modified_base 11: mod_base = OTHER; note = 2'-O-methyl modified nucleotide
  modified_base 12: mod_base = OTHER; note = 2'-fluoro modified nucleotide
  modified_base 13: mod_base = OTHER; note = 2'-O-methyl modified nucleotide
  modified_base 14: mod_base = OTHER; note = 2'-fluoro modified nucleotide with phosphorothioate linkage
  modified_base 15: mod_base = OTHER; note = 2'-O-methyl modified nucleotide with phosphorothioate linkage
  modified_base 16: mod_base = OTHER; note = 2'-fluoro modified nucleotide with phosphorothioate linkage
  modified_base 17: mod_base = OTHER; note = 2'-O-methyl modified nucleotide with phosphorothioate linkage
  modified_base 18: mod_base = OTHER; note = 2'-fluoro modified nucleotide with phosphorothioate linkage
  misc_difference 19: note = 2'-O-methyl modified nucleotide may be attached to trivalent N-Acetylgalactosamine
tcattctgattccttccgg

SEQ ID NO: 779 - RNA, 19 nt, synthetic construct
  source 1..19: mol_type = other RNA
  misc_difference 1: note = 2'-O-methyl modified nucleotide with phosphorothioate linkage may be modified with 5'-Phosphate
  modified_base 2: mod_base = OTHER; note = 2'-fluoro modified nucleotide with phosphorothioate linkage
  modified_base 3: mod_base = OTHER; note = 2'-O-methyl modified nucleotide
  modified_base 4: mod_base = OTHER; note = 2'-fluoro modified nucleotide
  modified_base 5: mod_base = OTHER; note = 2'-O-methyl modified nucleotide
  modified_base 6: mod_base = OTHER; note = 2'-fluoro modified nucleotide
  modified_base 7: mod_base = OTHER; note = 2'-O-methyl modified nucleotide
  modified_base 8: mod_base = OTHER; note = 2'-fluoro modified nucleotide
  modified_base 9: mod_base = OTHER; note = 2'-O-methyl modified nucleotide
  modified_base 10: mod_base = OTHER; note = 2'-fluoro modified nucleotide
  modified_base 11: mod_base = OTHER; note = 2'-O-methyl modified nucleotide
  modified_base 12: mod_base = OTHER; note = 2'-fluoro modified nucleotide
  modified_base 13: mod_base = OTHER; note = 2'-O-methyl modified nucleotide
  modified_base 14: mod_base = OTHER; note = 2'-fluoro modified nucleotide with phosphorothioate linkage
  modified_base 15: mod_base = OTHER; note = 2'-O-methyl modified nucleotide with phosphorothioate linkage
  modified_base 16: mod_base = OTHER; note = 2'-fluoro modified nucleotide with phosphorothioate linkage
  modified_base 17: mod_base = OTHER; note = 2'-O-methyl modified nucleotide with phosphorothioate linkage
  modified_base 18: mod_base = OTHER; note = 2'-fluoro modified nucleotide with phosphorothioate linkage
  misc_difference 19: note = 2'-O-methyl modified nucleotide may be attached to trivalent N-Acetylgalactosamine
tttcattgagccaacgcac

SEQ ID NO: 780 - RNA, 19 nt, synthetic construct
  source 1..19: mol_type = other RNA
  misc_difference 1: note = 2'-O-methyl modified nucleotide with phosphorothioate linkage may be modified with 5'-Phosphate
  modified_base 2: mod_base = OTHER; note = 2'-fluoro modified nucleotide with phosphorothioate linkage
  modified_base 3: mod_base = OTHER; note = 2'-O-methyl modified nucleotide
  modified_base 4: mod_base = OTHER; note = 2'-fluoro modified nucleotide
  modified_base 5: mod_base = OTHER; note = 2'-O-methyl modified nucleotide
  modified_base 6: mod_base = OTHER; note = 2'-fluoro modified nucleotide
  modified_base 7: mod_base = OTHER; note = 2'-O-methyl modified nucleotide
  modified_base 8: mod_base = OTHER; note = 2'-fluoro modified nucleotide
  modified_base 9: mod_base = OTHER; note = 2'-O-methyl modified nucleotide
  modified_base 10: mod_base = OTHER; note = 2'-fluoro modified nucleotide
  modified_base 11: mod_base = OTHER; note = 2'-O-methyl modified nucleotide
  modified_base 12: mod_base = OTHER; note = 2'-fluoro modified nucleotide
  modified_base 13: mod_base = OTHER; note = 2'-O-methyl modified nucleotide
  modified_base 14: mod_base = OTHER; note = 2'-fluoro modified nucleotide with phosphorothioate linkage
  modified_base 15: mod_base = OTHER; note = 2'-O-methyl modified nucleotide with phosphorothioate linkage
  modified_base 16: mod_base = OTHER; note = 2'-fluoro modified nucleotide with phosphorothioate linkage
  modified_base 17: mod_base = OTHER; note = 2'-O-methyl modified nucleotide with phosphorothioate linkage
  modified_base 18: mod_base = OTHER; note = 2'-fluoro modified nucleotide with phosphorothioate linkage
  misc_difference 19: note = 2'-O-methyl modified nucleotide may be attached to trivalent N-Acetylgalactosamine
tccaggtagatgatgaggg

SEQ ID NO: 781 - RNA, 19 nt, synthetic construct
  source 1..19: mol_type = other RNA
  misc_difference 1: note = 2'-O-methyl modified nucleotide with phosphorothioate linkage may be modified with 5'-Phosphate
  modified_base 2: mod_base = OTHER; note = 2'-fluoro modified nucleotide with phosphorothioate linkage
  modified_base 3: mod_base = OTHER; note = 2'-O-methyl modified nucleotide
  modified_base 4: mod_base = OTHER; note = 2'-fluoro modified nucleotide
  modified_base 5: mod_base = OTHER; note = 2'-O-methyl modified nucleotide
  modified_base 6: mod_base = OTHER; note = 2'-fluoro modified nucleotide
  modified_base 7: mod_base = OTHER; note = 2'-O-methyl modified nucleotide
  modified_base 8: mod_base = OTHER; note = 2'-fluoro modified nucleotide
  modified_base 9: mod_base = OTHER; note = 2'-O-methyl modified nucleotide
  modified_base 10: mod_base = OTHER; note = 2'-fluoro modified nucleotide
  modified_base 11: mod_base = OTHER; note = 2'-O-methyl modified nucleotide
  modified_base 12: mod_base = OTHER; note = 2'-fluoro modified nucleotide
  modified_base 13: mod_base = OTHER; note = 2'-O-methyl modified nucleotide
  modified_base 14: mod_base = OTHER; note = 2'-fluoro modified nucleotide with phosphorothioate linkage
  modified_base 15: mod_base = OTHER; note = 2'-O-methyl modified nucleotide with phosphorothioate linkage
  modified_base 16: mod_base = OTHER; note = 2'-fluoro modified nucleotide with phosphorothioate linkage
  modified_base 17: mod_base = OTHER; note = 2'-O-methyl modified nucleotide with phosphorothioate linkage
  modified_base 18: mod_base = OTHER; note = 2'-fluoro modified nucleotide with phosphorothioate linkage
  misc_difference 19: note = 2'-O-methyl modified nucleotide may be attached to trivalent N-Acetylgalactosamine
tgcaattctcctcagcaca

SEQ ID NO: 782 - RNA, 19 nt, synthetic construct
  source 1..19: mol_type = other RNA
  misc_difference 1: note = 2'-O-methyl modified nucleotide with phosphorothioate linkage may be modified with 5'-Phosphate
  modified_base 2: mod_base = OTHER; note = 2'-fluoro modified nucleotide with phosphorothioate linkage
  modified_base 3: mod_base = OTHER; note = 2'-O-methyl modified nucleotide
  modified_base 4: mod_base = OTHER; note = 2'-fluoro modified nucleotide
  modified_base 5: mod_base = OTHER; note = 2'-O-methyl modified nucleotide
  modified_base 6: mod_base = OTHER; note = 2'-fluoro modified nucleotide
  modified_base 7: mod_base = OTHER; note = 2'-O-methyl modified nucleotide
  modified_base 8: mod_base = OTHER; note = 2'-fluoro modified nucleotide
  modified_base 9: mod_base = OTHER; note = 2'-O-methyl modified nucleotide
  modified_base 10: mod_base = OTHER; note = 2'-fluoro modified nucleotide
  modified_base 11: mod_base = OTHER; note = 2'-O-methyl modified nucleotide
  modified_base 12: mod_base = OTHER; note = 2'-fluoro modified nucleotide
  modified_base 13: mod_base = OTHER; note = 2'-O-methyl modified nucleotide
  modified_base 14: mod_base = OTHER; note = 2'-fluoro modified nucleotide with phosphorothioate linkage
  modified_base 15: mod_base = OTHER; note = 2'-O-methyl modified nucleotide with phosphorothioate linkage
  modified_base 16: mod_base = OTHER; note = 2'-fluoro modified nucleotide with phosphorothioate linkage
  modified_base 17: mod_base = OTHER; note = 2'-O-methyl modified nucleotide with phosphorothioate linkage
  modified_base 18: mod_base = OTHER; note = 2'-fluoro modified nucleotide with phosphorothioate linkage
  misc_difference 19: note = 2'-O-methyl modified nucleotide may be attached to trivalent N-Acetylgalactosamine
ttaggctcggatcttccac

SEQ ID NO: 783 - RNA, 19 nt, synthetic construct
  source 1..19: mol_type = other RNA
  misc_difference 1: note = 2'-O-methyl modified nucleotide with phosphorothioate linkage may be modified with 5'-Phosphate
  modified_base 2: mod_base = OTHER; note = 2'-fluoro modified nucleotide with phosphorothioate linkage
  modified_base 3: mod_base = OTHER; note = 2'-O-methyl modified nucleotide
  modified_base 4: mod_base = OTHER; note = 2'-fluoro modified nucleotide
  modified_base 5: mod_base = OTHER; note = 2'-O-methyl modified nucleotide
  modified_base 6: mod_base = OTHER; note = 2'-fluoro modified nucleotide
  modified_base 7: mod_base = OTHER; note = 2'-O-methyl modified nucleotide
  modified_base 8: mod_base = OTHER; note = 2'-fluoro modified nucleotide
  modified_base 9: mod_base = OTHER; note = 2'-O-methyl modified nucleotide
  modified_base 10: mod_base = OTHER; note = 2'-fluoro modified nucleotide
  modified_base 11: mod_base = OTHER; note = 2'-O-methyl modified nucleotide
  modified_base 12: mod_base = OTHER; note = 2'-fluoro modified nucleotide
  modified_base 13: mod_base = OTHER; note = 2'-O-methyl modified nucleotide
  modified_base 14: mod_base = OTHER; note = 2'-fluoro modified nucleotide with phosphorothioate linkage
  modified_base 15: mod_base = OTHER; note = 2'-O-methyl modified nucleotide with phosphorothioate linkage
  modified_base 16: mod_base = OTHER; note = 2'-fluoro modified nucleotide with phosphorothioate linkage
  modified_base 17: mod_base = OTHER; note = 2'-O-methyl modified nucleotide with phosphorothioate linkage
  modified_base 18: mod_base = OTHER; note = 2'-fluoro modified nucleotide with phosphorothioate linkage
  misc_difference 19: note = 2'-O-methyl modified nucleotide may be attached to trivalent N-Acetylgalactosamine
tgccatgatgtactcgtca

SEQ ID NO: 784 - RNA, 19 nt, synthetic construct
  source 1..19: mol_type = other RNA
  misc_difference 1: note = 2'-O-methyl modified nucleotide with phosphorothioate linkage may be modified with 5'-Phosphate
  modified_base 2: mod_base = OTHER; note = 2'-fluoro modified nucleotide with phosphorothioate linkage
  modified_base 3: mod_base = OTHER; note = 2'-O-methyl modified nucleotide
  modified_base 4: mod_base = OTHER; note = 2'-fluoro modified nucleotide
  modified_base 5: mod_base = OTHER; note = 2'-O-methyl modified nucleotide
  modified_base 6: mod_base = OTHER; note = 2'-fluoro modified nucleotide
  modified_base 7: mod_base = OTHER; note = 2'-O-methyl modified nucleotide
  modified_base 8: mod_base = OTHER; note = 2'-fluoro modified nucleotide
  modified_base 9: mod_base = OTHER; note = 2'-O-methyl modified nucleotide
  modified_base 10: mod_base = OTHER; note = 2'-fluoro modified nucleotide
  modified_base 11: mod_base = OTHER; note = 2'-O-methyl modified nucleotide
  modified_base 12: mod_base = OTHER; note = 2'-fluoro modified nucleotide
  modified_base 13: mod_base = OTHER; note = 2'-O-methyl modified nucleotide
  modified_base 14: mod_base = OTHER; note = 2'-fluoro modified nucleotide with phosphorothioate linkage
  modified_base 15: mod_base = OTHER; note = 2'-O-methyl modified nucleotide with phosphorothioate linkage
  modified_base 16: mod_base = OTHER; note = 2'-fluoro modified nucleotide with phosphorothioate linkage
  modified_base 17: mod_base = OTHER; note = 2'-O-methyl modified nucleotide with phosphorothioate linkage
  modified_base 18: mod_base = OTHER; note = 2'-fluoro modified nucleotide with phosphorothioate linkage
  misc_difference 19: note = 2'-O-methyl modified nucleotide may be attached to trivalent N-Acetylgalactosamine
taaagtcattggacagctg

SEQ ID NO: 785 - RNA, 19 nt, synthetic construct
  source 1..19: mol_type = other RNA
  misc_difference 1: note = 2'-O-methyl modified nucleotide with phosphorothioate linkage may be modified with 5'-Phosphate
  modified_base 2: mod_base = OTHER; note = 2'-fluoro modified nucleotide with phosphorothioate linkage
  modified_base 3: mod_base = OTHER; note = 2'-O-methyl modified nucleotide
  modified_base 4: mod_base = OTHER; note = 2'-fluoro modified nucleotide
  modified_base 5: mod_base = OTHER; note = 2'-O-methyl modified nucleotide
  modified_base 6: mod_base = OTHER; note = 2'-fluoro modified nucleotide
  modified_base 7: mod_base = OTHER; note = 2'-O-methyl modified nucleotide
  modified_base 8: mod_base = OTHER; note = 2'-fluoro modified nucleotide
  modified_base 9: mod_base = OTHER; note = 2'-O-methyl modified nucleotide
  modified_base 10: mod_base = OTHER; note = 2'-fluoro modified nucleotide
  modified_base 11: mod_base = OTHER; note = 2'-O-methyl modified nucleotide
  modified_base 12: mod_base = OTHER; note = 2'-fluoro modified nucleotide
  modified_base 13: mod_base = OTHER; note = 2'-O-methyl modified nucleotide
  modified_base 14: mod_base = OTHER; note = 2'-fluoro modified nucleotide with phosphorothioate linkage
  modified_base 15: mod_base = OTHER; note = 2'-O-methyl modified nucleotide with phosphorothioate linkage
  modified_base 16: mod_base = OTHER; note = 2'-fluoro modified nucleotide with phosphorothioate linkage
  modified_base 17: mod_base = OTHER; note = 2'-O-methyl modified nucleotide with phosphorothioate linkage
  modified_base 18: mod_base = OTHER; note = 2'-fluoro modified nucleotide with phosphorothioate linkage
  misc_difference 19: note = 2'-O-methyl modified nucleotide may be attached to trivalent N-Acetylgalactosamine
tcatacttggagatgtatc

SEQ ID NO: 786 - RNA, 19 nt, synthetic construct
  source 1..19: mol_type = other RNA
  misc_difference 1: note = 2'-O-methyl modified nucleotide with phosphorothioate linkage may be modified with 5'-Phosphate
  modified_base 2: mod_base = OTHER; note = 2'-fluoro modified nucleotide with phosphorothioate linkage
  modified_base 3: mod_base = OTHER; note = 2'-O-methyl modified nucleotide
  modified_base 4: mod_base = OTHER; note = 2'-fluoro modified nucleotide
  modified_base 5: mod_base = OTHER; note = 2'-O-methyl modified nucleotide
  modified_base 6: mod_base = OTHER; note = 2'-fluoro modified nucleotide
  modified_base 7: mod_base = OTHER; note = 2'-O-methyl modified nucleotide
  modified_base 8: mod_base = OTHER; note = 2'-fluoro modified nucleotide
  modified_base 9: mod_base = OTHER; note = 2'-O-methyl modified nucleotide
  modified_base 10: mod_base = OTHER; note = 2'-fluoro modified nucleotide
  modified_base 11: mod_base = OTHER; note = 2'-O-methyl modified nucleotide
  modified_base 12: mod_base = OTHER; note = 2'-fluoro modified nucleotide
  modified_base 13: mod_base = OTHER; note = 2'-O-methyl modified nucleotide
  modified_base 14: mod_base = OTHER; note = 2'-fluoro modified nucleotide with phosphorothioate linkage
  modified_base 15: mod_base = OTHER; note = 2'-O-methyl modified nucleotide with phosphorothioate linkage
  modified_base 16: mod_base = OTHER; note = 2'-fluoro modified nucleotide with phosphorothioate linkage
  modified_base 17: mod_base = OTHER; note = 2'-O-methyl modified nucleotide with phosphorothioate linkage
  modified_base 18: mod_base = OTHER; note = 2'-fluoro modified nucleotide with phosphorothioate linkage
  misc_difference 19: note = 2'-O-methyl modified nucleotide may be attached to trivalent N-Acetylgalactosamine
ttggagatgtatctgtcaa

SEQ ID NO: 787 - RNA, 19 nt, synthetic construct
  source 1..19: mol_type = other RNA
  misc_difference 1: note = 2'-O-methyl modified nucleotide with phosphorothioate linkage may be modified with 5'-Phosphate
  modified_base 2: mod_base = OTHER; note = 2'-fluoro modified nucleotide with phosphorothioate linkage
  modified_base 3: mod_base = OTHER; note = 2'-O-methyl modified nucleotide
  modified_base 4: mod_base = OTHER; note = 2'-fluoro modified nucleotide
  modified_base 5: mod_base = OTHER; note = 2'-O-methyl modified nucleotide
  modified_base 6: mod_base = OTHER; note = 2'-fluoro modified nucleotide
  modified_base 7: mod_base = OTHER; note = 2'-O-methyl modified nucleotide
  modified_base 8: mod_base = OTHER; note = 2'-fluoro modified nucleotide
  modified_base 9: mod_base = OTHER; note = 2'-O-methyl modified nucleotide
  modified_base 10: mod_base = OTHER; note = 2'-fluoro modified nucleotide
  modified_base 11: mod_base = OTHER; note = 2'-O-methyl modified nucleotide
  modified_base 12: mod_base = OTHER; note = 2'-fluoro modified nucleotide
  modified_base 13: mod_base = OTHER; note = 2'-O-methyl modified nucleotide
  modified_base 14: mod_base = OTHER; note = 2'-fluoro modified nucleotide with phosphorothioate linkage
  modified_base 15: mod_base = OTHER; note = 2'-O-methyl modified nucleotide with phosphorothioate linkage
  modified_base 16: mod_base = OTHER; note = 2'-fluoro modified nucleotide with phosphorothioate linkage
  modified_base 17: mod_base = OTHER; note = 2'-O-methyl modified nucleotide with phosphorothioate linkage
  modified_base 18: mod_base = OTHER; note = 2'-fluoro modified nucleotide with phosphorothioate linkage
  misc_difference 19: note = 2'-O-methyl modified nucleotide may be attached to trivalent N-Acetylgalactosamine
tgtgatggagtctttcaaa

SEQ ID NO: 788 - RNA, 19 nt, synthetic construct
  source 1..19: mol_type = other RNA
  misc_difference 1: note = 2'-O-methyl modified nucleotide with phosphorothioate linkage may be modified with 5'-Phosphate
  modified_base 2: mod_base = OTHER; note = 2'-fluoro modified nucleotide with phosphorothioate linkage
  modified_base 3: mod_base = OTHER; note = 2'-O-methyl modified nucleotide
  modified_base 4: mod_base = OTHER; note = 2'-fluoro modified nucleotide
  modified_base 5: mod_base = OTHER; note = 2'-O-methyl modified nucleotide
  modified_base 6: mod_base = OTHER; note = 2'-fluoro modified nucleotide
  modified_base 7: mod_base = OTHER; note = 2'-O-methyl modified nucleotide
  modified_base 8: mod_base = OTHER; note = 2'-fluoro modified nucleotide
  modified_base 9: mod_base = OTHER; note = 2'-O-methyl modified nucleotide
  modified_base 10: mod_base = OTHER; note = 2'-fluoro modified nucleotide
  modified_base 11: mod_base = OTHER; note = 2'-O-methyl modified nucleotide
  modified_base 12: mod_base = OTHER; note = 2'-fluoro modified nucleotide
  modified_base 13: mod_base = OTHER; note = 2'-O-methyl modified nucleotide
  modified_base 14: mod_base = OTHER; note = 2'-fluoro modified nucleotide with phosphorothioate linkage
  modified_base 15: mod_base = OTHER; note = 2'-O-methyl modified nucleotide with phosphorothioate linkage
  modified_base 16: mod_base = OTHER; note = 2'-fluoro modified nucleotide with phosphorothioate linkage
  modified_base 17: mod_base = OTHER; note = 2'-O-methyl modified nucleotide with phosphorothioate linkage
  modified_base 18: mod_base = OTHER; note = 2'-fluoro modified nucleotide with phosphorothioate linkage
  misc_difference 19: note = 2'-O-methyl modified nucleotide may be attached to trivalent N-Acetylgalactosamine
tcacagtgtaggatctctg

SEQ ID NO: 789 - RNA, 19 nt, synthetic construct
  source 1..19: mol_type = other RNA
  misc_difference 1: note = 2'-O-methyl modified nucleotide with phosphorothioate linkage may be modified with 5'-Phosphate
  modified_base 2: mod_base = OTHER; note = 2'-fluoro modified nucleotide with phosphorothioate linkage
  modified_base 3: mod_base = OTHER; note = 2'-O-methyl modified nucleotide
  modified_base 4: mod_base = OTHER; note = 2'-fluoro modified nucleotide
  modified_base 5: mod_base = OTHER; note = 2'-O-methyl modified nucleotide
  modified_base 6: mod_base = OTHER; note = 2'-fluoro modified nucleotide
  modified_base 7: mod_base = OTHER; note = 2'-O-methyl modified nucleotide
  modified_base 8: mod_base = OTHER; note = 2'-fluoro modified nucleotide
  modified_base 9: mod_base = OTHER; note = 2'-O-methyl modified nucleotide
  modified_base 10: mod_base = OTHER; note = 2'-fluoro modified nucleotide
  modified_base 11: mod_base = OTHER; note = 2'-O-methyl modified nucleotide
  modified_base 12: mod_base = OTHER; note = 2'-fluoro modified nucleotide
  modified_base 13: mod_base = OTHER; note = 2'-O-methyl modified nucleotide
  modified_base 14: mod_base = OTHER; note = 2'-fluoro modified nucleotide with phosphorothioate linkage
  modified_base 15: mod_base = OTHER; note = 2'-O-methyl modified nucleotide with phosphorothioate linkage
  modified_base 16: mod_base = OTHER; note = 2'-fluoro modified nucleotide with phosphorothioate linkage
  modified_base 17: mod_base = OTHER; note = 2'-O-methyl modified nucleotide with phosphorothioate linkage
  modified_base 18: mod_base = OTHER; note = 2'-fluoro modified nucleotide with phosphorothioate linkage
  misc_difference 19: note = 2'-O-methyl modified nucleotide may be attached to trivalent N-Acetylgalactosamine
tctgtgactgtgaaaccct

SEQ ID NO: 790 - RNA, 19 nt, synthetic construct
  source 1..19: mol_type = other RNA
  misc_difference 1: note = 2'-O-methyl modified nucleotide with phosphorothioate linkage may be modified with 5'-Phosphate
  modified_base 2: mod_base = OTHER; note = 2'-fluoro modified nucleotide with phosphorothioate linkage
  modified_base 3: mod_base = OTHER; note = 2'-O-methyl modified nucleotide
  modified_base 4: mod_base = OTHER; note = 2'-fluoro modified nucleotide
  modified_base 5: mod_base = OTHER; note = 2'-O-methyl modified nucleotide
  modified_base 6: mod_base = OTHER; note = 2'-fluoro modified nucleotide
  modified_base 7: mod_base = OTHER; note = 2'-O-methyl modified nucleotide
  modified_base 8: mod_base = OTHER; note = 2'-fluoro modified nucleotide
  modified_base 9: mod_base = OTHER; note = 2'-O-methyl modified nucleotide
  modified_base 10: mod_base = OTHER; note = 2'-fluoro modified nucleotide
  modified_base 11: mod_base = OTHER; note = 2'-O-methyl modified nucleotide
  modified_base 12: mod_base = OTHER; note = 2'-fluoro modified nucleotide
  modified_base 13: mod_base = OTHER; note = 2'-O-methyl modified nucleotide
  modified_base 14: mod_base = OTHER; note = 2'-fluoro modified nucleotide with phosphorothioate linkage
  modified_base 15: mod_base = OTHER; note = 2'-O-methyl modified nucleotide with phosphorothioate linkage
  modified_base 16: mod_base = OTHER; note = 2'-fluoro modified nucleotide with phosphorothioate linkage
  modified_base 17: mod_base = OTHER; note = 2'-O-methyl modified nucleotide with phosphorothioate linkage
  modified_base 18: mod_base = OTHER; note = 2'-fluoro modified nucleotide with phosphorothioate linkage
  misc_difference 19: note = 2'-O-methyl modified nucleotide may be attached to trivalent N-Acetylgalactosamine
tcagaatctcccacgtggt

SEQ ID NO: 791 - RNA, 19 nt, synthetic construct
  source 1..19: mol_type = other RNA
  misc_difference 1: note = 2'-O-methyl modified nucleotide with phosphorothioate linkage may be modified with 5'-Phosphate
  modified_base 2: mod_base = OTHER; note = 2'-fluoro modified nucleotide with phosphorothioate linkage
  modified_base 3: mod_base = OTHER; note = 2'-O-methyl modified nucleotide
  modified_base 4: mod_base = OTHER; note = 2'-fluoro modified nucleotide
  modified_base 5: mod_base = OTHER; note = 2'-O-methyl modified nucleotide
  modified_base 6: mod_base = OTHER; note = 2'-fluoro modified nucleotide
  modified_base 7: mod_base = OTHER; note = 2'-O-methyl modified nucleotide
  modified_base 8: mod_base = OTHER; note = 2'-fluoro modified nucleotide
  modified_base 9: mod_base = OTHER; note = 2'-O-methyl modified nucleotide
  modified_base 10: mod_base = OTHER; note = 2'-fluoro modified nucleotide
  modified_base 11: mod_base = OTHER; note = 2'-O-methyl modified nucleotide
  modified_base 12: mod_base = OTHER; note = 2'-fluoro modified nucleotide
  modified_base 13: mod_base = OTHER; note = 2'-O-methyl modified nucleotide
  modified_base 14: mod_base = OTHER; note = 2'-fluoro modified nucleotide with phosphorothioate linkage
  modified_base 15: mod_base = OTHER; note = 2'-O-methyl modified nucleotide with phosphorothioate linkage
  modified_base 16: mod_base = OTHER; note = 2'-fluoro modified nucleotide with phosphorothioate linkage
  modified_base 17: mod_base = OTHER; note = 2'-O-methyl modified nucleotide with phosphorothioate linkage
  modified_base 18: mod_base = OTHER; note = 2'-fluoro modified nucleotide with phosphorothioate linkage
  misc_difference 19: note = 2'-O-methyl modified nucleotide may be attached to trivalent N-Acetylgalactosamine
tctgctttagtgatgctgc

SEQ ID NO: 792 - RNA, 19 nt, synthetic construct
  source 1..19: mol_type = other RNA
  misc_difference 1: note = 2'-O-methyl modified nucleotide with phosphorothioate linkage may be modified with 5'-Phosphate
  modified_base 2: mod_base = OTHER; note = 2'-fluoro modified nucleotide with phosphorothioate linkage
  modified_base 3: mod_base = OTHER; note = 2'-O-methyl modified nucleotide
  modified_base 4: mod_base = OTHER; note = 2'-fluoro modified nucleotide
  modified_base 5: mod_base = OTHER; note = 2'-O-methyl modified nucleotide
  modified_base 6: mod_base = OTHER; note = 2'-fluoro modified nucleotide
  modified_base 7: mod_base = OTHER; note = 2'-O-methyl modified nucleotide
  modified_base 8: mod_base = OTHER; note = 2'-fluoro modified nucleotide
  modified_base 9: mod_base = OTHER; note = 2'-O-methyl modified nucleotide
  modified_base 10: mod_base = OTHER; note = 2'-fluoro modified nucleotide
  modified_base 11: mod_base = OTHER; note = 2'-O-methyl modified nucleotide
  modified_base 12: mod_base = OTHER; note = 2'-fluoro modified nucleotide
  modified_base 13: mod_base = OTHER; note = 2'-O-methyl modified nucleotide
  modified_base 14: mod_base = OTHER; note = 2'-fluoro modified nucleotide with phosphorothioate linkage
  modified_base 15: mod_base = OTHER; note = 2'-O-methyl modified nucleotide with phosphorothioate linkage
  modified_base 16: mod_base = OTHER; note = 2'-fluoro modified nucleotide with phosphorothioate linkage
  modified_base 17: mod_base = OTHER; note = 2'-O-methyl modified nucleotide with phosphorothioate linkage
  modified_base 18: mod_base = OTHER; note = 2'-fluoro modified nucleotide with phosphorothioate linkage
  misc_difference 19: note = 2'-O-methyl modified nucleotide may be attached to trivalent N-Acetylgalactosamine
ttgagggtgttcctatcgg

SEQ ID NO: 793 - RNA, 19 nt, synthetic construct
  source 1..19: mol_type = other RNA
  misc_difference 1: note = 2'-O-methyl modified nucleotide with phosphorothioate linkage may be modified with 5'-Phosphate
  modified_base 2: mod_base = OTHER; note = 2'-fluoro modified nucleotide with phosphorothioate linkage
  modified_base 3: mod_base = OTHER; note = 2'-O-methyl modified nucleotide
  modified_base 4: mod_base = OTHER; note = 2'-fluoro modified nucleotide
  modified_base 5: mod_base = OTHER; note = 2'-O-methyl modified nucleotide
  modified_base 6: mod_base = OTHER; note = 2'-fluoro modified nucleotide
  modified_base 7: mod_base = OTHER; note = 2'-O-methyl modified nucleotide
  modified_base 8: mod_base = OTHER; note = 2'-fluoro modified nucleotide
  modified_base 9: mod_base = OTHER; note = 2'-O-methyl modified nucleotide
  modified_base 10: mod_base = OTHER; note = 2'-fluoro modified nucleotide
  modified_base 11: mod_base = OTHER; note = 2'-O-methyl modified nucleotide
  modified_base 12: mod_base = OTHER; note = 2'-fluoro modified nucleotide
  modified_base 13: mod_base = OTHER; note = 2'-O-methyl modified nucleotide
  modified_base 14: mod_base = OTHER; note = 2'-fluoro modified nucleotide with phosphorothioate linkage
  modified_base 15: mod_base = OTHER; note = 2'-O-methyl modified nucleotide with phosphorothioate linkage
  modified_base 16: mod_base = OTHER; note = 2'-fluoro modified nucleotide with phosphorothioate linkage
  modified_base 17: mod_base = OTHER; note = 2'-O-methyl modified nucleotide with phosphorothioate linkage
  modified_base 18: mod_base = OTHER; note = 2'-fluoro modified nucleotide with phosphorothioate linkage
  misc_difference 19: note = 2'-O-methyl modified nucleotide may be attached to trivalent N-Acetylgalactosamine
tagcatggtacattgtcac

SEQ ID NO: 794 - RNA, 19 nt, synthetic construct
  source 1..19: mol_type = other RNA
  misc_difference 1: note = 2'-O-methyl modified nucleotide with phosphorothioate linkage may be modified with 5'-Phosphate
  modified_base 2: mod_base = OTHER; note = 2'-fluoro modified nucleotide with phosphorothioate linkage
  modified_base 3: mod_base = OTHER; note = 2'-O-methyl modified nucleotide
  modified_base 4: mod_base = OTHER; note = 2'-fluoro modified nucleotide
  modified_base 5: mod_base = OTHER; note = 2'-O-methyl modified nucleotide
  modified_base 6: mod_base = OTHER; note = 2'-fluoro modified nucleotide
  modified_base 7: mod_base = OTHER; note = 2'-O-methyl modified nucleotide
  modified_base 8: mod_base = OTHER; note = 2'-fluoro modified nucleotide
  modified_base 9: mod_base = OTHER; note = 2'-O-methyl modified nucleotide
  modified_base 10: mod_base = OTHER; note = 2'-fluoro modified nucleotide
  modified_base 11: mod_base = OTHER; note = 2'-O-methyl modified nucleotide
  modified_base 12: mod_base = OTHER; note = 2'-fluoro modified nucleotide
  modified_base 13: mod_base = OTHER; note = 2'-O-methyl modified nucleotide
  modified_base 14: mod_base = OTHER; note = 2'-fluoro modified nucleotide with phosphorothioate linkage
  modified_base 15: mod_base = OTHER; note = 2'-O-methyl modified nucleotide with phosphorothioate linkage
  modified_base 16: mod_base = OTHER; note = 2'-fluoro modified nucleotide with phosphorothioate linkage
  modified_base 17: mod_base = OTHER; note = 2'-O-methyl modified nucleotide with phosphorothioate linkage
  modified_base 18: mod_base = OTHER; note = 2'-fluoro modified nucleotide with phosphorothioate linkage
  misc_difference 19: note = 2'-O-methyl modified nucleotide may be attached to trivalent N-Acetylgalactosamine
tgagggtgttcctatcgga

SEQ ID NO: 795 - RNA, 19 nt, synthetic construct
  source 1..19: mol_type = other RNA
  misc_difference 1: note = 2'-O-methyl modified nucleotide with phosphorothioate linkage may be modified with 5'-Phosphate
  modified_base 2: mod_base = OTHER; note = 2'-fluoro modified nucleotide with phosphorothioate linkage
  modified_base 3: mod_base = OTHER; note = 2'-O-methyl modified nucleotide
  modified_base 4: mod_base = OTHER; note = 2'-fluoro modified nucleotide
  modified_base 5: mod_base = OTHER; note = 2'-O-methyl modified nucleotide
  modified_base 6: mod_base = OTHER; note = 2'-fluoro modified nucleotide
  modified_base 7: mod_base = OTHER; note = 2'-O-methyl modified nucleotide
  modified_base 8: mod_base = OTHER; note = 2'-fluoro modified nucleotide
  modified_base 9: mod_base = OTHER; note = 2'-O-methyl modified nucleotide
  modified_base 10: mod_base = OTHER; note = 2'-fluoro modified nucleotide
  modified_base 11: mod_base = OTHER; note = 2'-O-methyl modified nucleotide
  modified_base 12: mod_base = OTHER; note = 2'-fluoro modified nucleotide
  modified_base 13: mod_base = OTHER; note = 2'-O-methyl modified nucleotide
  modified_base 14: mod_base = OTHER; note = 2'-fluoro modified nucleotide with phosphorothioate linkage
  modified_base 15: mod_base = OTHER; note = 2'-O-methyl modified nucleotide with phosphorothioate linkage
  modified_base 16: mod_base = OTHER; note = 2'-fluoro modified nucleotide with phosphorothioate linkage
  modified_base 17: mod_base = OTHER; note = 2'-O-methyl modified nucleotide with phosphorothioate linkage
  modified_base 18: mod_base = OTHER; note = 2'-fluoro modified nucleotide with phosphorothioate linkage
  misc_difference 19: note = 2'-O-methyl modified nucleotide may be attached to trivalent N-Acetylgalactosamine
tgtagaatttctctgtagg

SEQ ID NO: 796 - RNA, 19 nt, synthetic construct
  source 1..19: mol_type = other RNA
  misc_difference 1: note = 2'-O-methyl modified nucleotide with phosphorothioate linkage may be modified with 5'-Phosphate
  modified_base 2: mod_base = OTHER; note = 2'-fluoro modified nucleotide with phosphorothioate linkage
  modified_base 3: mod_base = OTHER; note = 2'-O-methyl modified nucleotide
  modified_base 4: mod_base = OTHER; note = 2'-fluoro modified nucleotide
  modified_base 5: mod_base = OTHER; note = 2'-O-methyl modified nucleotide
  modified_base 6: mod_base = OTHER; note = 2'-fluoro modified nucleotide
  modified_base 7: mod_base = OTHER; note = 2'-O-methyl modified nucleotide
  modified_base 8: mod_base = OTHER; note = 2'-fluoro modified nucleotide
  modified_base 9: mod_base = OTHER; note = 2'-O-methyl modified nucleotide
  modified_base 10: mod_base = OTHER; note = 2'-fluoro modified nucleotide
  modified_base 11: mod_base = OTHER; note = 2'-O-methyl modified nucleotide
  modified_base 12: mod_base = OTHER; note = 2'-fluoro modified nucleotide
  modified_base 13: mod_base = OTHER; note = 2'-O-methyl modified nucleotide
  modified_base 14: mod_base = OTHER; note = 2'-fluoro modified nucleotide with phosphorothioate linkage
  modified_base 15: mod_base = OTHER; note = 2'-O-methyl modified nucleotide with phosphorothioate linkage
  modified_base 16: mod_base = OTHER; note = 2'-fluoro modified nucleotide with phosphorothioate linkage
  modified_base 17: mod_base = OTHER; note = 2'-O-methyl modified nucleotide with phosphorothioate linkage
  modified_base 18: mod_base = OTHER; note = 2'-fluoro modified nucleotide with phosphorothioate linkage
  misc_difference 19: note = 2'-O-methyl modified nucleotide may be attached to trivalent N-Acetylgalactosamine
tggtgaactttgaaagcta

SEQ ID NO: 797 - RNA, 19 nt, synthetic construct
  source 1..19: mol_type = other RNA
  misc_difference 1: note = 2'-O-methyl modified nucleotide with phosphorothioate linkage may be modified with 5'-Phosphate
  modified_base 2: mod_base = OTHER; note = 2'-fluoro modified nucleotide with phosphorothioate linkage
  modified_base 3: mod_base = OTHER; note = 2'-O-methyl modified nucleotide
  modified_base 4: mod_base = OTHER; note = 2'-fluoro modified nucleotide
  modified_base 5: mod_base = OTHER; note = 2'-O-methyl modified nucleotide
  modified_base 6: mod_base = OTHER; note = 2'-fluoro modified nucleotide
  modified_base 7: mod_base = OTHER; note = 2'-O-methyl modified nucleotide
  modified_base 8: mod_base = OTHER; note = 2'-fluoro modified nucleotide
  modified_base 9: mod_base = OTHER; note = 2'-O-methyl modified nucleotide
  modified_base 10: mod_base = OTHER; note = 2'-fluoro modified nucleotide
  modified_base 11: mod_base = OTHER; note = 2'-O-methyl modified nucleotide
  modified_base 12: mod_base = OTHER; note = 2'-fluoro modified nucleotide
  modified_base 13: mod_base = OTHER; note = 2'-O-methyl modified nucleotide
  modified_base 14: mod_base = OTHER; note = 2'-fluoro modified nucleotide with phosphorothioate linkage
  modified_base 15: mod_base = OTHER; note = 2'-O-methyl modified nucleotide with phosphorothioate linkage
  modified_base 16: mod_base = OTHER; note = 2'-fluoro modified nucleotide with phosphorothioate linkage
  modified_base 17: mod_base = OTHER; note = 2'-O-methyl modified nucleotide with phosphorothioate linkage
  modified_base 18: mod_base = OTHER; note = 2'-fluoro modified nucleotide with phosphorothioate linkage
  misc_difference 19: note = 2'-O-methyl modified nucleotide may be attached to trivalent N-Acetylgalactosamine
tccatgttgacgagttccg

SEQ ID NO: 798 - RNA, 19 nt, synthetic construct
  source 1..19: mol_type = other RNA
  misc_difference 1: note = 2'-O-methyl modified nucleotide with phosphorothioate linkage may be modified with 5'-Phosphate
  modified_base 2: mod_base = OTHER; note = 2'-fluoro modified nucleotide with phosphorothioate linkage
  modified_base 3: mod_base = OTHER; note = 2'-O-methyl modified nucleotide
  modified_base 4: mod_base = OTHER; note = 2'-fluoro modified nucleotide
  modified_base 5: mod_base = OTHER; note = 2'-O-methyl modified nucleotide
  modified_base 6: mod_base = OTHER; note = 2'-fluoro modified nucleotide
  modified_base 7: mod_base = OTHER; note = 2'-O-methyl modified nucleotide
  modified_base 8: mod_base = OTHER; note = 2'-fluoro modified nucleotide
  modified_base 9: mod_base = OTHER; note = 2'-O-methyl modified nucleotide
  modified_base 10: mod_base = OTHER; note = 2'-fluoro modified nucleotide
  modified_base 11: mod_base = OTHER; note = 2'-O-methyl modified nucleotide
  modified_base 12: mod_base = OTHER; note = 2'-fluoro modified nucleotide
  modified_base 13: mod_base = OTHER; note = 2'-O-methyl modified nucleotide
  modified_base 14: mod_base = OTHER; note = 2'-fluoro modified nucleotide with phosphorothioate linkage
  modified_base 15: mod_base = OTHER; note = 2'-O-methyl modified nucleotide with phosphorothioate linkage
  modified_base 16: mod_base = OTHER; note = 2'-fluoro modified nucleotide with phosphorothioate linkage
  modified_base 17: mod_base = OTHER; note = 2'-O-methyl modified nucleotide with phosphorothioate linkage
  modified_base 18: mod_base = OTHER; note = 2'-fluoro modified nucleotide with phosphorothioate linkage
  misc_difference 19: note = 2'-O-methyl modified nucleotide may be attached to trivalent N-Acetylgalactosamine
tgatgcaggtaattgttgg

SEQ ID NO: 799 - RNA, 19 nt, synthetic construct
  source 1..19: mol_type = other RNA
  misc_difference 1: note = 2'-O-methyl modified nucleotide with phosphorothioate linkage may be modified with 5'-Phosphate
  modified_base 2: mod_base = OTHER; note = 2'-fluoro modified nucleotide with phosphorothioate linkage
  modified_base 3: mod_base = OTHER; note = 2'-O-methyl modified nucleotide
  modified_base 4: mod_base = OTHER; note = 2'-fluoro modified nucleotide
  modified_base 5: mod_base = OTHER; note = 2'-O-methyl modified nucleotide
  modified_base 6: mod_base = OTHER; note = 2'-fluoro modified nucleotide
  modified_base 7: mod_base = OTHER; note = 2'-O-methyl modified nucleotide
  modified_base 8: mod_base = OTHER; note = 2'-fluoro modified nucleotide
  modified_base 9: mod_base = OTHER; note = 2'-O-methyl modified nucleotide
  modified_base 10: mod_base = OTHER; note = 2'-fluoro modified nucleotide
  modified_base 11: mod_base = OTHER; note = 2'-O-methyl modified nucleotide
  modified_base 12: mod_base = OTHER; note = 2'-fluoro modified nucleotide
  modified_base 13: mod_base = OTHER; note = 2'-O-methyl modified nucleotide
  modified_base 14: mod_base = OTHER; note = 2'-fluoro modified nucleotide with phosphorothioate linkage
  modified_base 15: mod_base = OTHER; note = 2'-O-methyl modified nucleotide with phosphorothioate linkage
  modified_base 16: mod_base = OTHER; note = 2'-fluoro modified nucleotide with phosphorothioate linkage
  modified_base 17: mod_base = OTHER; note = 2'-O-methyl modified nucleotide with phosphorothioate linkage
  modified_base 18: mod_base = OTHER; note = 2'-fluoro modified nucleotide with phosphorothioate linkage
  misc_difference 19: note = 2'-O-methyl modified nucleotide may be attached to trivalent N-Acetylgalactosamine
tgtacctggtacagatctc

SEQ ID NO: 800 - RNA, 19 nt, synthetic construct
  source 1..19: mol_type = other RNA
  misc_difference 1: note = 2'-O-methyl modified nucleotide with phosphorothioate linkage may be modified with 5'-Phosphate
  modified_base 2: mod_base = OTHER; note = 2'-fluoro modified nucleotide with phosphorothioate linkage
  modified_base 3: mod_base = OTHER; note = 2'-O-methyl modified nucleotide
  modified_base 4: mod_base = OTHER; note = 2'-fluoro modified nucleotide
  modified_base 5: mod_base = OTHER; note = 2'-O-methyl modified nucleotide
  modified_base 6: mod_base = OTHER; note = 2'-fluoro modified nucleotide
  modified_base 7: mod_base = OTHER; note = 2'-O-methyl modified nucleotide
  modified_base 8: mod_base = OTHER; note = 2'-fluoro modified nucleotide
  modified_base 9: mod_base = OTHER; note = 2'-O-methyl modified nucleotide
  modified_base 10: mod_base = OTHER; note = 2'-fluoro modified nucleotide
  modified_base 11: mod_base = OTHER; note = 2'-O-methyl modified nucleotide
  modified_base 12: mod_base = OTHER; note = 2'-fluoro modified nucleotide
  modified_base 13: mod_base = OTHER; note = 2'-O-methyl modified nucleotide
  modified_base 14: mod_base = OTHER; note = 2'-fluoro modified nucleotide with phosphorothioate linkage
  modified_base 15: mod_base = OTHER; note = 2'-O-methyl modified nucleotide with phosphorothioate linkage
  modified_base 16: mod_base = OTHER; note = 2'-fluoro modified nucleotide with phosphorothioate linkage
  modified_base 17: mod_base = OTHER; note = 2'-O-methyl modified nucleotide with phosphorothioate linkage
  modified_base 18: mod_base = OTHER; note = 2'-fluoro modified nucleotide with phosphorothioate linkage
  misc_difference 19: note = 2'-O-methyl modified nucleotide may be attached to trivalent N-Acetylgalactosamine
ttaattgttggagttgccc

SEQ ID NO: 801 - RNA, 19 nt, synthetic construct
  source 1..19: mol_type = other RNA
  misc_difference 1: note = 2'-O-methyl modified nucleotide with phosphorothioate linkage may be modified with 5'-Phosphate
  modified_base 2: mod_base = OTHER; note = 2'-fluoro modified nucleotide with phosphorothioate linkage
  modified_base 3: mod_base = OTHER; note = 2'-O-methyl modified nucleotide
  modified_base 4: mod_base = OTHER; note = 2'-fluoro modified nucleotide
  modified_base 5: mod_base = OTHER; note = 2'-O-methyl modified nucleotide
  modified_base 6: mod_base = OTHER; note = 2'-fluoro modified nucleotide
  modified_base 7: mod_base = OTHER; note = 2'-O-methyl modified nucleotide
  modified_base 8: mod_base = OTHER; note = 2'-fluoro modified nucleotide
  modified_base 9: mod_base = OTHER; note = 2'-O-methyl modified nucleotide
  modified_base 10: mod_base = OTHER; note = 2'-fluoro modified nucleotide
  modified_base 11: mod_base = OTHER; note = 2'-O-methyl modified nucleotide
  modified_base 12: mod_base = OTHER; note = 2'-fluoro modified nucleotide
  modified_base 13: mod_base = OTHER; note = 2'-O-methyl modified nucleotide
  modified_base 14: mod_base = OTHER; note = 2'-fluoro modified nucleotide with phosphorothioate linkage
  modified_base 15: mod_base = OTHER; note = 2'-O-methyl modified nucleotide with phosphorothioate linkage
  modified_base 16: mod_base = OTHER; note = 2'-fluoro modified nucleotide with phosphorothioate linkage
  modified_base 17: mod_base = OTHER; note = 2'-O-methyl modified nucleotide with phosphorothioate linkage
  modified_base 18: mod_base = OTHER; note = 2'-fluoro modified nucleotide with phosphorothioate linkage
  misc_difference 19: note = 2'-O-methyl modified nucleotide may be attached to trivalent N-Acetylgalactosamine
taattgttggagttgccca

SEQ ID NO: 802 - RNA, 19 nt, synthetic construct
  source 1..19: mol_type = other RNA
  misc_difference 1: note = 2'-O-methyl modified nucleotide with phosphorothioate linkage may be modified with 5'-Phosphate
  modified_base 2: mod_base = OTHER; note = 2'-fluoro modified nucleotide with phosphorothioate linkage
  modified_base 3: mod_base = OTHER; note = 2'-O-methyl modified nucleotide
  modified_base 4: mod_base = OTHER; note = 2'-fluoro modified nucleotide
  modified_base 5: mod_base = OTHER; note = 2'-O-methyl modified nucleotide
  modified_base 6: mod_base = OTHER; note = 2'-fluoro modified nucleotide
  modified_base 7: mod_base = OTHER; note = 2'-O-methyl modified nucleotide
  modified_base 8: mod_base = OTHER; note = 2'-fluoro modified nucleotide
  modified_base 9: mod_base = OTHER; note = 2'-O-methyl modified nucleotide
  modified_base 10: mod_base = OTHER; note = 2'-fluoro modified nucleotide
  modified_base 11: mod_base = OTHER; note = 2'-O-methyl modified nucleotide
  modified_base 12: mod_base = OTHER; note = 2'-fluoro modified nucleotide
  modified_base 13: mod_base = OTHER; note = 2'-O-methyl modified nucleotide
  modified_base 14: mod_base = OTHER; note = 2'-fluoro modified nucleotide with phosphorothioate linkage
  modified_base 15: mod_base = OTHER; note = 2'-O-methyl modified nucleotide with phosphorothioate linkage
  modified_base 16: mod_base = OTHER; note = 2'-fluoro modified nucleotide with phosphorothioate linkage
  modified_base 17: mod_base = OTHER; note = 2'-O-methyl modified nucleotide with phosphorothioate linkage
  modified_base 18: mod_base = OTHER; note = 2'-fluoro modified nucleotide with phosphorothioate linkage
  misc_difference 19: note = 2'-O-methyl modified nucleotide may be attached to trivalent N-Acetylgalactosamine
tcgccatcctggatcccga

SEQ ID NO: 803 - RNA, 19 nt, synthetic construct
  source 1..19: mol_type = other RNA
  misc_difference 1: note = 2'-O-methyl modified nucleotide with phosphorothioate linkage may be modified with 5'-Phosphate
  modified_base 2: mod_base = OTHER; note = 2'-fluoro modified nucleotide with phosphorothioate linkage
  modified_base 3: mod_base = OTHER; note = 2'-O-methyl modified nucleotide
  modified_base 4: mod_base = OTHER; note = 2'-fluoro modified nucleotide
  modified_base 5: mod_base = OTHER; note = 2'-O-methyl modified nucleotide
  modified_base 6: mod_base = OTHER; note = 2'-fluoro modified nucleotide
  modified_base 7: mod_base = OTHER; note = 2'-O-methyl modified nucleotide
  modified_base 8: mod_base = OTHER; note = 2'-fluoro modified nucleotide
  modified_base 9: mod_base = OTHER; note = 2'-O-methyl modified nucleotide
  modified_base 10: mod_base = OTHER; note = 2'-fluoro modified nucleotide
  modified_base 11: mod_base = OTHER; note = 2'-O-methyl modified nucleotide
  modified_base 12: mod_base = OTHER; note = 2'-fluoro modified nucleotide
  modified_base 13: mod_base = OTHER; note = 2'-O-methyl modified nucleotide
  modified_base 14: mod_base = OTHER; note = 2'-fluoro modified nucleotide with phosphorothioate linkage
  modified_base 15: mod_base = OTHER; note = 2'-O-methyl modified nucleotide with phosphorothioate linkage
  modified_base 16: mod_base = OTHER; note = 2'-fluoro modified nucleotide with phosphorothioate linkage
  modified_base 17: mod_base = OTHER; note = 2'-O-methyl modified nucleotide with phosphorothioate linkage
  modified_base 18: mod_base = OTHER; note = 2'-fluoro modified nucleotide with phosphorothioate linkage
  misc_difference 19: note = 2'-O-methyl modified nucleotide may be attached to trivalent N-Acetylgalactosamine
tgaatttctctgtaggctc

SEQ ID NO: 804 - RNA, 19 nt, synthetic construct
  source 1..19: mol_type = other RNA
  misc_difference 1: note = 2'-O-methyl modified nucleotide with phosphorothioate linkage may be modified with 5'-Phosphate
  modified_base 2: mod_base = OTHER; note = 2'-fluoro modified nucleotide with phosphorothioate linkage
  modified_base 3: mod_base = OTHER; note = 2'-O-methyl modified nucleotide
  modified_base 4: mod_base = OTHER; note = 2'-fluoro modified nucleotide
  modified_base 5: mod_base = OTHER; note = 2'-O-methyl modified nucleotide
  modified_base 6: mod_base = OTHER; note = 2'-fluoro modified nucleotide
  modified_base 7: mod_base = OTHER; note = 2'-O-methyl modified nucleotide
  modified_base 8: mod_base = OTHER; note = 2'-fluoro modified nucleotide
  modified_base 9: mod_base = OTHER; note = 2'-O-methyl modified nucleotide
  modified_base 10: mod_base = OTHER; note = 2'-fluoro modified nucleotide
  modified_base 11: mod_base = OTHER; note = 2'-O-methyl modified nucleotide
  modified_base 12: mod_base = OTHER; note = 2'-fluoro modified nucleotide
  modified_base 13: mod_base = OTHER; note = 2'-O-methyl modified nucleotide
  modified_base 14: mod_base = OTHER; note = 2'-fluoro modified nucleotide with phosphorothioate linkage
  modified_base 15: mod_base = OTHER; note = 2'-O-methyl modified nucleotide with phosphorothioate linkage
  modified_base 16: mod_base = OTHER; note = 2'-fluoro modified nucleotide with phosphorothioate linkage
  modified_base 17: mod_base = OTHER; note = 2'-O-methyl modified nucleotide with phosphorothioate linkage
  modified_base 18: mod_base = OTHER; note = 2'-fluoro modified nucleotide with phosphorothioate linkage
  misc_difference 19: note = 2'-O-methyl modified nucleotide may be attached to trivalent N-Acetylgalactosamine
tcaaagtcttttagctgca

SEQ ID NO: 805 - RNA, 19 nt, synthetic construct
  source 1..19: mol_type = other RNA
  misc_difference 1: note = 2'-O-methyl modified nucleotide with phosphorothioate linkage may be modified with 5'-Phosphate
  modified_base 2: mod_base = OTHER; note = 2'-fluoro modified nucleotide with phosphorothioate linkage
  modified_base 3: mod_base = OTHER; note = 2'-O-methyl modified nucleotide
  modified_base 4: mod_base = OTHER; note = 2'-fluoro modified nucleotide
  modified_base 5: mod_base = OTHER; note = 2'-O-methyl modified nucleotide
  modified_base 6: mod_base = OTHER; note = 2'-fluoro modified nucleotide
  modified_base 7: mod_base = OTHER; note = 2'-O-methyl modified nucleotide
  modified_base 8: mod_base = OTHER; note = 2'-fluoro modified nucleotide
  modified_base 9: mod_base = OTHER; note = 2'-O-methyl modified nucleotide
  modified_base 10: mod_base = OTHER; note = 2'-fluoro modified nucleotide
  modified_base 11: mod_base = OTHER; note = 2'-O-methyl modified nucleotide
  modified_base 12: mod_base = OTHER; note = 2'-fluoro modified nucleotide
  modified_base 13: mod_base = OTHER; note = 2'-O-methyl modified nucleotide
  modified_base 14: mod_base = OTHER; note = 2'-fluoro modified nucleotide with phosphorothioate linkage
  modified_base 15: mod_base = OTHER; note = 2'-O-methyl modified nucleotide with phosphorothioate linkage
  modified_base 16: mod_base = OTHER; note = 2'-fluoro modified nucleotide with phosphorothioate linkage
  modified_base 17: mod_base = OTHER; note = 2'-O-methyl modified nucleotide with phosphorothioate linkage
  modified_base 18: mod_base = OTHER; note = 2'-fluoro modified nucleotide with phosphorothioate linkage
  misc_difference 19: note = 2'-O-methyl modified nucleotide may be attached to trivalent N-Acetylgalactosamine
tcgagttccggaatgtccc

SEQ ID NO: 806 - RNA, 19 nt, synthetic construct
  source 1..19: mol_type = other RNA
  misc_difference 1: note = 2'-O-methyl modified nucleotide with phosphorothioate linkage may be modified with 5'-Phosphate
  modified_base 2: mod_base = OTHER; note = 2'-fluoro modified nucleotide with phosphorothioate linkage
  modified_base 3: mod_base = OTHER; note = 2'-O-methyl modified nucleotide
  modified_base 4: mod_base = OTHER; note = 2'-fluoro modified nucleotide
  modified_base 5: mod_base = OTHER; note = 2'-O-methyl modified nucleotide
  modified_base 6: mod_base = OTHER; note = 2'-fluoro modified nucleotide
  modified_base 7: mod_base = OTHER; note = 2'-O-methyl modified nucleotide
  modified_base 8: mod_base = OTHER; note = 2'-fluoro modified nucleotide
  modified_base 9: mod_base = OTHER; note = 2'-O-methyl modified nucleotide
  modified_base 10: mod_base = OTHER; note = 2'-fluoro modified nucleotide
  modified_base 11: mod_base = OTHER; note = 2'-O-methyl modified nucleotide
  modified_base 12: mod_base = OTHER; note = 2'-fluoro modified nucleotide
  modified_base 13: mod_base = OTHER; note = 2'-O-methyl modified nucleotide
  modified_base 14: mod_base = OTHER; note = 2'-fluoro modified nucleotide with phosphorothioate linkage
  modified_base 15: mod_base = OTHER; note = 2'-O-methyl modified nucleotide with phosphorothioate linkage
  modified_base 16: mod_base = OTHER; note = 2'-fluoro modified nucleotide with phosphorothioate linkage
  modified_base 17: mod_base = OTHER; note = 2'-O-methyl modified nucleotide with phosphorothioate linkage
  modified_base 18: mod_base = OTHER; note = 2'-fluoro modified nucleotide with phosphorothioate linkage
  misc_difference 19: note = 2'-O-methyl modified nucleotide may be attached to trivalent N-Acetylgalactosamine
taagcaattctcctcagca

SEQ ID NO: 807 - RNA, 19 nt, synthetic construct
  source 1..19: mol_type = other RNA
  misc_difference 1: note = 2'-O-methyl modified nucleotide with phosphorothioate linkage may be modified with 5'-Phosphate
  modified_base 2: mod_base = OTHER; note = 2'-fluoro modified nucleotide with phosphorothioate linkage
  modified_base 3: mod_base = OTHER; note = 2'-O-methyl modified nucleotide
  modified_base 4: mod_base = OTHER; note = 2'-fluoro modified nucleotide
  modified_base 5: mod_base = OTHER; note = 2'-O-methyl modified nucleotide
  modified_base 6: mod_base = OTHER; note = 2'-fluoro modified nucleotide
  modified_base 7: mod_base = OTHER; note = 2'-O-methyl modified nucleotide
  modified_base 8: mod_base = OTHER; note = 2'-fluoro modified nucleotide
  modified_base 9: mod_base = OTHER; note = 2'-O-methyl modified nucleotide
  modified_base 10: mod_base = OTHER; note = 2'-fluoro modified nucleotide
  modified_base 11: mod_base = OTHER; note = 2'-O-methyl modified nucleotide
  modified_base 12: mod_base = OTHER; note = 2'-fluoro modified nucleotide
  modified_base 13: mod_base = OTHER; note = 2'-O-methyl modified nucleotide
  modified_base 14: mod_base = OTHER; note = 2'-fluoro modified nucleotide with phosphorothioate linkage
  modified_base 15: mod_base = OTHER; note = 2'-O-methyl modified nucleotide with phosphorothioate linkage
  modified_base 16: mod_base = OTHER; note = 2'-fluoro modified nucleotide with phosphorothioate linkage
  modified_base 17: mod_base = OTHER; note = 2'-O-methyl modified nucleotide with phosphorothioate linkage
  modified_base 18: mod_base = OTHER; note = 2'-fluoro modified nucleotide with phosphorothioate linkage
  misc_difference 19: note = 2'-O-methyl modified nucleotide may be attached to trivalent N-Acetylgalactosamine
taacgatgttctcttctgc

SEQ ID NO: 808 - RNA, 19 nt, synthetic construct
  source 1..19: mol_type = other RNA
  misc_difference 1: note = 2'-O-methyl modified nucleotide with phosphorothioate linkage may be modified with 5'-Phosphate
  modified_base 2: mod_base = OTHER; note = 2'-fluoro modified nucleotide with phosphorothioate linkage
  modified_base 3: mod_base = OTHER; note = 2'-O-methyl modified nucleotide
  modified_base 4: mod_base = OTHER; note = 2'-fluoro modified nucleotide
  modified_base 5: mod_base = OTHER; note = 2'-O-methyl modified nucleotide
  modified_base 6: mod_base = OTHER; note = 2'-fluoro modified nucleotide
  modified_base 7: mod_base = OTHER; note = 2'-O-methyl modified nucleotide
  modified_base 8: mod_base = OTHER; note = 2'-fluoro modified nucleotide
  modified_base 9: mod_base = OTHER; note = 2'-O-methyl modified nucleotide
  modified_base 10: mod_base = OTHER; note = 2'-fluoro modified nucleotide
  modified_base 11: mod_base = OTHER; note = 2'-O-methyl modified nucleotide
  modified_base 12: mod_base = OTHER; note = 2'-fluoro modified nucleotide
  modified_base 13: mod_base = OTHER; note = 2'-O-methyl modified nucleotide
  modified_base 14: mod_base = OTHER; note = 2'-fluoro modified nucleotide with phosphorothioate linkage
  modified_base 15: mod_base = OTHER; note = 2'-O-methyl modified nucleotide with phosphorothioate linkage
  modified_base 16: mod_base = OTHER; note = 2'-fluoro modified nucleotide with phosphorothioate linkage
  modified_base 17: mod_base = OTHER; note = 2'-O-methyl modified nucleotide with phosphorothioate linkage
  modified_base 18: mod_base = OTHER; note = 2'-fluoro modified nucleotide with phosphorothioate linkage
  misc_difference 19: note = 2'-O-methyl modified nucleotide may be attached to trivalent N-Acetylgalactosamine
tggatcccgaagatgacaa

SEQ ID NO: 809 - RNA, 19 nt, synthetic construct
  source 1..19: mol_type = other RNA
  misc_difference 1: note = 2'-O-methyl modified nucleotide with phosphorothioate linkage may be modified with 5'-Phosphate
  modified_base 2: mod_base = OTHER; note = 2'-fluoro modified nucleotide with phosphorothioate linkage
  modified_base 3: mod_base = OTHER; note = 2'-O-methyl modified nucleotide
  modified_base 4: mod_base = OTHER; note = 2'-fluoro modified nucleotide
  modified_base 5: mod_base = OTHER; note = 2'-O-methyl modified nucleotide
  modified_base 6: mod_base = OTHER; note = 2'-fluoro modified nucleotide
  modified_base 7: mod_base = OTHER; note = 2'-O-methyl modified nucleotide
  modified_base 8: mod_base = OTHER; note = 2'-fluoro modified nucleotide
  modified_base 9: mod_base = OTHER; note = 2'-O-methyl modified nucleotide
  modified_base 10: mod_base = OTHER; note = 2'-fluoro modified nucleotide
  modified_base 11: mod_base = OTHER; note = 2'-O-methyl modified nucleotide
  modified_base 12: mod_base = OTHER; note = 2'-fluoro modified nucleotide
  modified_base 13: mod_base = OTHER; note = 2'-O-methyl modified nucleotide
  modified_base 14: mod_base = OTHER; note = 2'-fluoro modified nucleotide with phosphorothioate linkage
  modified_base 15: mod_base = OTHER; note = 2'-O-methyl modified nucleotide with phosphorothioate linkage
  modified_base 16: mod_base = OTHER; note = 2'-fluoro modified nucleotide with phosphorothioate linkage
  modified_base 17: mod_base = OTHER; note = 2'-O-methyl modified nucleotide with phosphorothioate linkage
  modified_base 18: mod_base = OTHER; note = 2'-fluoro modified nucleotide with phosphorothioate linkage
  misc_difference 19: note = 2'-O-methyl modified nucleotide may be attached to trivalent N-Acetylgalactosamine
tagagcttgttcagctttc

SEQ ID NO: 810 - RNA, 19 nt, synthetic construct
  source 1..19: mol_type = other RNA
  misc_difference 1: note = 2'-O-methyl modified nucleotide with phosphorothioate linkage may be modified with 5'-Phosphate
  modified_base 2: mod_base = OTHER; note = 2'-fluoro modified nucleotide with phosphorothioate linkage
  modified_base 3: mod_base = OTHER; note = 2'-O-methyl modified nucleotide
  modified_base 4: mod_base = OTHER; note = 2'-fluoro modified nucleotide
  modified_base 5: mod_base = OTHER; note = 2'-O-methyl modified nucleotide
  modified_base 6: mod_base = OTHER; note = 2'-fluoro modified nucleotide
  modified_base 7: mod_base = OTHER; note = 2'-O-methyl modified nucleotide
  modified_base 8: mod_base = OTHER; note = 2'-fluoro modified nucleotide
  modified_base 9: mod_base = OTHER; note = 2'-O-methyl modified nucleotide
  modified_base 10: mod_base = OTHER; note = 2'-fluoro modified nucleotide
  modified_base 11: mod_base = OTHER; note = 2'-O-methyl modified nucleotide
  modified_base 12: mod_base = OTHER; note = 2'-fluoro modified nucleotide
  modified_base 13: mod_base = OTHER; note = 2'-O-methyl modified nucleotide
  modified_base 14: mod_base = OTHER; note = 2'-fluoro modified nucleotide with phosphorothioate linkage
  modified_base 15: mod_base = OTHER; note = 2'-O-methyl modified nucleotide with phosphorothioate linkage
  modified_base 16: mod_base = OTHER; note = 2'-fluoro modified nucleotide with phosphorothioate linkage
  modified_base 17: mod_base = OTHER; note = 2'-O-methyl modified nucleotide with phosphorothioate linkage
  modified_base 18: mod_base = OTHER; note = 2'-fluoro modified nucleotide with phosphorothioate linkage
  misc_difference 19: note = 2'-O-methyl modified nucleotide may be attached to trivalent N-Acetylgalactosamine
ttagacatagtggcatcct

SEQ ID NO: 811 - RNA, 19 nt, synthetic construct
  source 1..19: mol_type = other RNA
  misc_difference 1: note = 2'-O-methyl modified nucleotide with phosphorothioate linkage may be modified with 5'-Phosphate
  modified_base 2: mod_base = OTHER; note = 2'-fluoro modified nucleotide with phosphorothioate linkage
  modified_base 3: mod_base = OTHER; note = 2'-O-methyl modified nucleotide
  modified_base 4: mod_base = OTHER; note = 2'-fluoro modified nucleotide
  modified_base 5: mod_base = OTHER; note = 2'-O-methyl modified nucleotide
  modified_base 6: mod_base = OTHER; note = 2'-fluoro modified nucleotide
  modified_base 7: mod_base = OTHER; note = 2'-O-methyl modified nucleotide
  modified_base 8: mod_base = OTHER; note = 2'-fluoro modified nucleotide
  modified_base 9: mod_base = OTHER; note = 2'-O-methyl modified nucleotide
  modified_base 10: mod_base = OTHER; note = 2'-fluoro modified nucleotide
  modified_base 11: mod_base = OTHER; note = 2'-O-methyl modified nucleotide
  modified_base 12: mod_base = OTHER; note = 2'-fluoro modified nucleotide
  modified_base 13: mod_base = OTHER; note = 2'-O-methyl modified nucleotide
  modified_base 14: mod_base = OTHER; note = 2'-fluoro modified nucleotide with phosphorothioate linkage
  modified_base 15: mod_base = OTHER; note = 2'-O-methyl modified nucleotide with phosphorothioate linkage
  modified_base 16: mod_base = OTHER; note = 2'-fluoro modified nucleotide with phosphorothioate linkage
  modified_base 17: mod_base = OTHER; note = 2'-O-methyl modified nucleotide with phosphorothioate linkage
  modified_base 18: mod_base = OTHER; note = 2'-fluoro modified nucleotide with phosphorothioate linkage
  misc_difference 19: note = 2'-O-methyl modified nucleotide may be attached to trivalent N-Acetylgalactosamine
tggtaattgttggagttgc

SEQ ID NO: 812 - RNA, 19 nt, synthetic construct
  source 1..19: mol_type = other RNA
  misc_difference 1: note = 2'-O-methyl modified nucleotide with phosphorothioate linkage may be modified with 5'-Phosphate
  modified_base 2: mod_base = OTHER; note = 2'-fluoro modified nucleotide with phosphorothioate linkage
  modified_base 3: mod_base = OTHER; note = 2'-O-methyl modified nucleotide
  modified_base 4: mod_base = OTHER; note = 2'-fluoro modified nucleotide
  modified_base 5: mod_base = OTHER; note = 2'-O-methyl modified nucleotide
  modified_base 6: mod_base = OTHER; note = 2'-fluoro modified nucleotide
  modified_base 7: mod_base = OTHER; note = 2'-O-methyl modified nucleotide
  modified_base 8: mod_base = OTHER; note = 2'-fluoro modified nucleotide
  modified_base 9: mod_base = OTHER; note = 2'-O-methyl modified nucleotide
  modified_base 10: mod_base = OTHER; note = 2'-fluoro modified nucleotide
  modified_base 11: mod_base = OTHER; note = 2'-O-methyl modified nucleotide
  modified_base 12: mod_base = OTHER; note = 2'-fluoro modified nucleotide
  modified_base 13: mod_base = OTHER; note = 2'-O-methyl modified nucleotide
  modified_base 14: mod_base = OTHER; note = 2'-fluoro modified nucleotide with phosphorothioate linkage
  modified_base 15: mod_base = OTHER; note = 2'-O-methyl modified nucleotide with phosphorothioate linkage
  modified_base 16: mod_base = OTHER; note = 2'-fluoro modified nucleotide with phosphorothioate linkage
  modified_base 17: mod_base = OTHER; note = 2'-O-methyl modified nucleotide with phosphorothioate linkage
  modified_base 18: mod_base = OTHER; note = 2'-fluoro modified nucleotide with phosphorothioate linkage
  misc_difference 19: note = 2'-O-methyl modified nucleotide may be attached to trivalent N-Acetylgalactosamine
tctgattccttccggcacg

SEQ ID NO: 813 - RNA, 19 nt, synthetic construct
  source 1..19: mol_type = other RNA
  misc_difference 1: note = 2'-O-methyl modified nucleotide with phosphorothioate linkage may be modified with 5'-Phosphate
  modified_base 2: mod_base = OTHER; note = 2'-fluoro modified nucleotide with phosphorothioate linkage
  modified_base 3: mod_base = OTHER; note = 2'-O-methyl modified nucleotide
  modified_base 4: mod_base = OTHER; note = 2'-fluoro modified nucleotide
  modified_base 5: mod_base = OTHER; note = 2'-O-methyl modified nucleotide
  modified_base 6: mod_base = OTHER; note = 2'-fluoro modified nucleotide
  modified_base 7: mod_base = OTHER; note = 2'-O-methyl modified nucleotide
  modified_base 8: mod_base = OTHER; note = 2'-fluoro modified nucleotide
  modified_base 9: mod_base = OTHER; note = 2'-O-methyl modified nucleotide
  modified_base 10: mod_base = OTHER; note = 2'-fluoro modified nucleotide
  modified_base 11: mod_base = OTHER; note = 2'-O-methyl modified nucleotide
  modified_base 12: mod_base = OTHER; note = 2'-fluoro modified nucleotide
  modified_base 13: mod_base = OTHER; note = 2'-O-methyl modified nucleotide
  modified_base 14: mod_base = OTHER; note = 2'-fluoro modified nucleotide with phosphorothioate linkage
  modified_base 15: mod_base = OTHER; note = 2'-O-methyl modified nucleotide with phosphorothioate linkage
  modified_base 16: mod_base = OTHER; note = 2'-fluoro modified nucleotide with phosphorothioate linkage
  modified_base 17: mod_base = OTHER; note = 2'-O-methyl modified nucleotide with phosphorothioate linkage
  modified_base 18: mod_base = OTHER; note = 2'-fluoro modified nucleotide with phosphorothioate linkage
  misc_difference 19: note = 2'-O-methyl modified nucleotide may be attached to trivalent N-Acetylgalactosamine
tgaaaccctcattttcctt

SEQ ID NO: 814 - RNA, 19 nt, synthetic construct
  source 1..19: mol_type = other RNA
  misc_difference 1: note = 2'-O-methyl modified nucleotide with phosphorothioate linkage may be modified with 5'-Phosphate
  modified_base 2: mod_base = OTHER; note = 2'-fluoro modified nucleotide with phosphorothioate linkage
  modified_base 3: mod_base = OTHER; note = 2'-O-methyl modified nucleotide
  modified_base 4: mod_base = OTHER; note = 2'-fluoro modified nucleotide
  modified_base 5: mod_base = OTHER; note = 2'-O-methyl modified nucleotide
  modified_base 6: mod_base = OTHER; note = 2'-fluoro modified nucleotide
  modified_base 7: mod_base = OTHER; note = 2'-O-methyl modified nucleotide
  modified_base 8: mod_base = OTHER; note = 2'-fluoro modified nucleotide
  modified_base 9: mod_base = OTHER; note = 2'-O-methyl modified nucleotide
  modified_base 10: mod_base = OTHER; note = 2'-fluoro modified nucleotide
  modified_base 11: mod_base = OTHER; note = 2'-O-methyl modified nucleotide
  modified_base 12: mod_base = OTHER; note = 2'-fluoro modified nucleotide
  modified_base 13: mod_base = OTHER; note = 2'-O-methyl modified nucleotide
  modified_base 14: mod_base = OTHER; note = 2'-fluoro modified nucleotide with phosphorothioate linkage
  modified_base 15: mod_base = OTHER; note = 2'-O-methyl modified nucleotide with phosphorothioate linkage
  modified_base 16: mod_base = OTHER; note = 2'-fluoro modified nucleotide with phosphorothioate linkage
  modified_base 17: mod_base = OTHER; note = 2'-O-methyl modified nucleotide with phosphorothioate linkage
  modified_base 18: mod_base = OTHER; note = 2'-fluoro modified nucleotide with phosphorothioate linkage
  misc_difference 19: note = 2'-O-methyl modified nucleotide may be attached to trivalent N-Acetylgalactosamine
tatcatagtgttcttggca

SEQ ID NO: 815 - RNA, 19 nt, synthetic construct
  source 1..19: mol_type = other RNA
  misc_difference 1: note = 2'-O-methyl modified nucleotide with phosphorothioate linkage may be modified with 5'-Phosphate
  modified_base 2: mod_base = OTHER; note = 2'-fluoro modified nucleotide with phosphorothioate linkage
  modified_base 3: mod_base = OTHER; note = 2'-O-methyl modified nucleotide
  modified_base 4: mod_base = OTHER; note = 2'-fluoro modified nucleotide
  modified_base 5: mod_base = OTHER; note = 2'-O-methyl modified nucleotide
  modified_base 6: mod_base = OTHER; note = 2'-fluoro modified nucleotide
  modified_base 7: mod_base = OTHER; note = 2'-O-methyl modified nucleotide
  modified_base 8: mod_base = OTHER; note = 2'-fluoro modified nucleotide
  modified_base 9: mod_base = OTHER; note = 2'-O-methyl modified nucleotide
  modified_base 10: mod_base = OTHER; note = 2'-fluoro modified nucleotide
  modified_base 11: mod_base = OTHER; note = 2'-O-methyl modified nucleotide
  modified_base 12: mod_base = OTHER; note = 2'-fluoro modified nucleotide
  modified_base 13: mod_base = OTHER; note = 2'-O-methyl modified nucleotide
  modified_base 14: mod_base = OTHER; note = 2'-fluoro modified nucleotide with phosphorothioate linkage
  modified_base 15: mod_base = OTHER; note = 2'-O-methyl modified nucleotide with phosphorothioate linkage
  modified_base 16: mod_base = OTHER; note = 2'-fluoro modified nucleotide with phosphorothioate linkage
  modified_base 17: mod_base = OTHER; note = 2'-O-methyl modified nucleotide with phosphorothioate linkage
  modified_base 18: mod_base = OTHER; note = 2'-fluoro modified nucleotide with phosphorothioate linkage
  misc_difference 19: note = 2'-O-methyl modified nucleotide may be attached to trivalent N-Acetylgalactosamine
tgtgctggttttatggtga

SEQ ID NO: 816 - RNA, 19 nt, synthetic construct
  source 1..19: mol_type = other RNA
  misc_difference 1: note = 2'-O-methyl modified nucleotide with phosphorothioate linkage may be modified with 5'-Phosphate
  modified_base 2: mod_base = OTHER; note = 2'-fluoro modified nucleotide with phosphorothioate linkage
  modified_base 3: mod_base = OTHER; note = 2'-O-methyl modified nucleotide
  modified_base 4: mod_base = OTHER; note = 2'-fluoro modified nucleotide
  modified_base 5: mod_base = OTHER; note = 2'-O-methyl modified nucleotide
  modified_base 6: mod_base = OTHER; note = 2'-fluoro modified nucleotide
  modified_base 7: mod_base = OTHER; note = 2'-O-methyl modified nucleotide
  modified_base 8: mod_base = OTHER; note = 2'-fluoro modified nucleotide
  modified_base 9: mod_base = OTHER; note = 2'-O-methyl modified nucleotide
  modified_base 10: mod_base = OTHER; note = 2'-fluoro modified nucleotide
  modified_base 11: mod_base = OTHER; note = 2'-O-methyl modified nucleotide
  modified_base 12: mod_base = OTHER; note = 2'-fluoro modified nucleotide
  modified_base 13: mod_base = OTHER; note = 2'-O-methyl modified nucleotide
  modified_base 14: mod_base = OTHER; note = 2'-fluoro modified nucleotide with phosphorothioate linkage
  modified_base 15: mod_base = OTHER; note = 2'-O-methyl modified nucleotide with phosphorothioate linkage
  modified_base 16: mod_base = OTHER; note = 2'-fluoro modified nucleotide with phosphorothioate linkage
  modified_base 17: mod_base = OTHER; note = 2'-O-methyl modified nucleotide with phosphorothioate linkage
  modified_base 18: mod_base = OTHER; note = 2'-fluoro modified nucleotide with phosphorothioate linkage
  misc_difference 19: note = 2'-O-methyl modified nucleotide may be attached to trivalent N-Acetylgalactosamine
taaagggcattcctggttt

SEQ ID NO: 817 - RNA, 19 nt, synthetic construct
  source 1..19: mol_type = other RNA
  misc_difference 1: note = 2'-O-methyl modified nucleotide with phosphorothioate linkage may be modified with 5'-Phosphate
  modified_base 2: mod_base = OTHER; note = 2'-fluoro modified nucleotide with phosphorothioate linkage
  modified_base 3: mod_base = OTHER; note = 2'-O-methyl modified nucleotide
  modified_base 4: mod_base = OTHER; note = 2'-fluoro modified nucleotide
  modified_base 5: mod_base = OTHER; note = 2'-O-methyl modified nucleotide
  modified_base 6: mod_base = OTHER; note = 2'-fluoro modified nucleotide
  modified_base 7: mod_base = OTHER; note = 2'-O-methyl modified nucleotide
  modified_base 8: mod_base = OTHER; note = 2'-fluoro modified nucleotide
  modified_base 9: mod_base = OTHER; note = 2'-O-methyl modified nucleotide
  modified_base 10: mod_base = OTHER; note = 2'-fluoro modified nucleotide
  modified_base 11: mod_base = OTHER; note = 2'-O-methyl modified nucleotide
  modified_base 12: mod_base = OTHER; note = 2'-fluoro modified nucleotide
  modified_base 13: mod_base = OTHER; note = 2'-O-methyl modified nucleotide
  modified_base 14: mod_base = OTHER; note = 2'-fluoro modified nucleotide with phosphorothioate linkage
  modified_base 15: mod_base = OTHER; note = 2'-O-methyl modified nucleotide with phosphorothioate linkage
  modified_base 16: mod_base = OTHER; note = 2'-fluoro modified nucleotide with phosphorothioate linkage
  modified_base 17: mod_base = OTHER; note = 2'-O-methyl modified nucleotide with phosphorothioate linkage
  modified_base 18: mod_base = OTHER; note = 2'-fluoro modified nucleotide with phosphorothioate linkage
  misc_difference 19: note = 2'-O-methyl modified nucleotide may be attached to trivalent N-Acetylgalactosamine
tccaggttactcctggcca

SEQ ID NO: 818 - RNA, 19 nt, synthetic construct
  source 1..19: mol_type = other RNA
  misc_difference 1: note = 2'-O-methyl modified nucleotide with phosphorothioate linkage may be modified with 5'-Phosphate
  modified_base 2: mod_base = OTHER; note = 2'-fluoro modified nucleotide with phosphorothioate linkage
  modified_base 3: mod_base = OTHER; note = 2'-O-methyl modified nucleotide
  modified_base 4: mod_base = OTHER; note = 2'-fluoro modified nucleotide
  modified_base 5: mod_base = OTHER; note = 2'-O-methyl modified nucleotide
  modified_base 6: mod_base = OTHER; note = 2'-fluoro modified nucleotide
  modified_base 7: mod_base = OTHER; note = 2'-O-methyl modified nucleotide
  modified_base 8: mod_base = OTHER; note = 2'-fluoro modified nucleotide
  modified_base 9: mod_base = OTHER; note = 2'-O-methyl modified nucleotide
  modified_base 10: mod_base = OTHER; note = 2'-fluoro modified nucleotide
  modified_base 11: mod_base = OTHER; note = 2'-O-methyl modified nucleotide
  modified_base 12: mod_base = OTHER; note = 2'-fluoro modified nucleotide
  modified_base 13: mod_base = OTHER; note = 2'-O-methyl modified nucleotide
  modified_base 14: mod_base = OTHER; note = 2'-fluoro modified nucleotide with phosphorothioate linkage
  modified_base 15: mod_base = OTHER; note = 2'-O-methyl modified nucleotide with phosphorothioate linkage
  modified_base 16: mod_base = OTHER; note = 2'-fluoro modified nucleotide with phosphorothioate linkage
  modified_base 17: mod_base = OTHER; note = 2'-O-methyl modified nucleotide with phosphorothioate linkage
  modified_base 18: mod_base = OTHER; note = 2'-fluoro modified nucleotide with phosphorothioate linkage
  misc_difference 19: note = 2'-O-methyl modified nucleotide may be attached to trivalent N-Acetylgalactosamine
taagtcttttagctgcagt

SEQ ID NO: 819 - RNA, 19 nt, synthetic construct
  source 1..19: mol_type = other RNA
  misc_difference 1: note = 2'-O-methyl modified nucleotide with phosphorothioate linkage may be modified with 5'-Phosphate
  modified_base 2: mod_base = OTHER; note = 2'-fluoro modified nucleotide with phosphorothioate linkage
  modified_base 3: mod_base = OTHER; note = 2'-O-methyl modified nucleotide
  modified_base 4: mod_base = OTHER; note = 2'-fluoro modified nucleotide
  modified_base 5: mod_base = OTHER; note = 2'-O-methyl modified nucleotide
  modified_base 6: mod_base = OTHER; note = 2'-fluoro modified nucleotide
  modified_base 7: mod_base = OTHER; note = 2'-O-methyl modified nucleotide
  modified_base 8: mod_base = OTHER; note = 2'-fluoro modified nucleotide
  modified_base 9: mod_base = OTHER; note = 2'-O-methyl modified nucleotide
  modified_base 10: mod_base = OTHER; note = 2'-fluoro modified nucleotide
  modified_base 11: mod_base = OTHER; note = 2'-O-methyl modified nucleotide
  modified_base 12: mod_base = OTHER; note = 2'-fluoro modified nucleotide
  modified_base 13: mod_base = OTHER; note = 2'-O-methyl modified nucleotide
  modified_base 14: mod_base = OTHER; note = 2'-fluoro modified nucleotide with phosphorothioate linkage
  modified_base 15: mod_base = OTHER; note = 2'-O-methyl modified nucleotide with phosphorothioate linkage
  modified_base 16: mod_base = OTHER; note = 2'-fluoro modified nucleotide with phosphorothioate linkage
  modified_base 17: mod_base = OTHER; note = 2'-O-methyl modified nucleotide with phosphorothioate linkage
  modified_base 18: mod_base = OTHER; note = 2'-fluoro modified nucleotide with phosphorothioate linkage
  misc_difference 19: note = 2'-O-methyl modified nucleotide may be attached to trivalent N-Acetylgalactosamine
ttgggttgtctgaaggcca

SEQ ID NO: 820 - RNA, 19 nt, synthetic construct
  source 1..19: mol_type = other RNA
  misc_difference 1: note = 2'-O-methyl modified nucleotide with phosphorothioate linkage may be modified with 5'-Phosphate
  modified_base 2: mod_base = OTHER; note = 2'-fluoro modified nucleotide with phosphorothioate linkage
  modified_base 3: mod_base = OTHER; note = 2'-O-methyl modified nucleotide
  modified_base 4: mod_base = OTHER; note = 2'-fluoro modified nucleotide
  modified_base 5: mod_base = OTHER; note = 2'-O-methyl modified nucleotide
  modified_base 6: mod_base = OTHER; note = 2'-fluoro modified nucleotide
  modified_base 7: mod_base = OTHER; note = 2'-O-methyl modified nucleotide
  modified_base 8: mod_base = OTHER; note = 2'-fluoro modified nucleotide
  modified_base 9: mod_base = OTHER; note = 2'-O-methyl modified nucleotide
  modified_base 10: mod_base = OTHER; note = 2'-fluoro modified nucleotide
  modified_base 11: mod_base = OTHER; note = 2'-O-methyl modified nucleotide
  modified_base 12: mod_base = OTHER; note = 2'-fluoro modified nucleotide
  modified_base 13: mod_base = OTHER; note = 2'-O-methyl modified nucleotide
  modified_base 14: mod_base = OTHER; note = 2'-fluoro modified nucleotide with phosphorothioate linkage
  modified_base 15: mod_base = OTHER; note = 2'-O-methyl modified nucleotide with phosphorothioate linkage
  modified_base 16: mod_base = OTHER; note = 2'-fluoro modified nucleotide with phosphorothioate linkage
  modified_base 17: mod_base = OTHER; note = 2'-O-methyl modified nucleotide with phosphorothioate linkage
  modified_base 18: mod_base = OTHER; note = 2'-fluoro modified nucleotide with phosphorothioate linkage
  misc_difference 19: note = 2'-O-methyl modified nucleotide may be attached to trivalent N-Acetylgalactosamine
tccagctcatacttggaga

SEQ ID NO: 821 - RNA, 19 nt, synthetic construct
  source 1..19: mol_type = other RNA
  misc_difference 1: note = 2'-O-methyl modified nucleotide with phosphorothioate linkage may be modified with 5'-Phosphate
  modified_base 2: mod_base = OTHER; note = 2'-fluoro modified nucleotide with phosphorothioate linkage
  modified_base 3: mod_base = OTHER; note = 2'-O-methyl modified nucleotide
  modified_base 4: mod_base = OTHER; note = 2'-fluoro modified nucleotide
  modified_base 5: mod_base = OTHER; note = 2'-O-methyl modified nucleotide
  modified_base 6: mod_base = OTHER; note = 2'-fluoro modified nucleotide
  modified_base 7: mod_base = OTHER; note = 2'-O-methyl modified nucleotide
  modified_base 8: mod_base = OTHER; note = 2'-fluoro modified nucleotide
  modified_base 9: mod_base = OTHER; note = 2'-O-methyl modified nucleotide
  modified_base 10: mod_base = OTHER; note = 2'-fluoro modified nucleotide
  modified_base 11: mod_base = OTHER; note = 2'-O-methyl modified nucleotide
  modified_base 12: mod_base = OTHER; note = 2'-fluoro modified nucleotide
  modified_base 13: mod_base = OTHER; note = 2'-O-methyl modified nucleotide
  modified_base 14: mod_base = OTHER; note = 2'-fluoro modified nucleotide with phosphorothioate linkage
  modified_base 15: mod_base = OTHER; note = 2'-O-methyl modified nucleotide with phosphorothioate linkage
  modified_base 16: mod_base = OTHER; note = 2'-fluoro modified nucleotide with phosphorothioate linkage
  modified_base 17: mod_base = OTHER; note = 2'-O-methyl modified nucleotide with phosphorothioate linkage
  modified_base 18: mod_base = OTHER; note = 2'-fluoro modified nucleotide with phosphorothioate linkage
  misc_difference 19: note = 2'-O-methyl modified nucleotide may be attached to trivalent N-Acetylgalactosamine
tgaagtcctgcattactgt

SEQ ID NO: 822 - RNA, 19 nt, synthetic construct
  source 1..19: mol_type = other RNA
  misc_difference 1: note = 2'-O-methyl modified nucleotide with phosphorothioate linkage may be modified with 5'-Phosphate
  modified_base 2: mod_base = OTHER; note = 2'-fluoro modified nucleotide with phosphorothioate linkage
  modified_base 3: mod_base = OTHER; note = 2'-O-methyl modified nucleotide
  modified_base 4: mod_base = OTHER; note = 2'-fluoro modified nucleotide
  modified_base 5: mod_base = OTHER; note = 2'-O-methyl modified nucleotide
  modified_base 6: mod_base = OTHER; note = 2'-fluoro modified nucleotide
  modified_base 7: mod_base = OTHER; note = 2'-O-methyl modified nucleotide
  modified_base 8: mod_base = OTHER; note = 2'-fluoro modified nucleotide
  modified_base 9: mod_base = OTHER; note = 2'-O-methyl modified nucleotide
  modified_base 10: mod_base = OTHER; note = 2'-fluoro modified nucleotide
  modified_base 11: mod_base = OTHER; note = 2'-O-methyl modified nucleotide
  modified_base 12: mod_base = OTHER; note = 2'-fluoro modified nucleotide
  modified_base 13: mod_base = OTHER; note = 2'-O-methyl modified nucleotide
  modified_base 14: mod_base = OTHER; note = 2'-fluoro modified nucleotide with phosphorothioate linkage
  modified_base 15: mod_base = OTHER; note = 2'-O-methyl modified nucleotide with phosphorothioate linkage
  modified_base 16: mod_base = OTHER; note = 2'-fluoro modified nucleotide with phosphorothioate linkage
  modified_base 17: mod_base = OTHER; note = 2'-O-methyl modified nucleotide with phosphorothioate linkage
  modified_base 18: mod_base = OTHER; note = 2'-fluoro modified nucleotide with phosphorothioate linkage
  misc_difference 19: note = 2'-O-methyl modified nucleotide may be attached to trivalent N-Acetylgalactosamine
tcagatcttactctgcgtc

SEQ ID NO: 823 - RNA, 19 nt, synthetic construct
  source 1..19: mol_type = other RNA
  misc_difference 1: note = 2'-O-methyl modified nucleotide with phosphorothioate linkage may be modified with 5'-Phosphate
  modified_base 2: mod_base = OTHER; note = 2'-fluoro modified nucleotide with phosphorothioate linkage
  modified_base 3: mod_base = OTHER; note = 2'-O-methyl modified nucleotide
  modified_base 4: mod_base = OTHER; note = 2'-fluoro modified nucleotide
  modified_base 5: mod_base = OTHER; note = 2'-O-methyl modified nucleotide
  modified_base 6: mod_base = OTHER; note = 2'-fluoro modified nucleotide
  modified_base 7: mod_base = OTHER; note = 2'-O-methyl modified nucleotide
  modified_base 8: mod_base = OTHER; note = 2'-fluoro modified nucleotide
  modified_base 9: mod_base = OTHER; note = 2'-O-methyl modified nucleotide
  modified_base 10: mod_base = OTHER; note = 2'-fluoro modified nucleotide
  modified_base 11: mod_base = OTHER; note = 2'-O-methyl modified nucleotide
  modified_base 12: mod_base = OTHER; note = 2'-fluoro modified nucleotide
  modified_base 13: mod_base = OTHER; note = 2'-O-methyl modified nucleotide
  modified_base 14: mod_base = OTHER; note = 2'-fluoro modified nucleotide with phosphorothioate linkage
  modified_base 15: mod_base = OTHER; note = 2'-O-methyl modified nucleotide with phosphorothioate linkage
  modified_base 16: mod_base = OTHER; note = 2'-fluoro modified nucleotide with phosphorothioate linkage
  modified_base 17: mod_base = OTHER; note = 2'-O-methyl modified nucleotide with phosphorothioate linkage
  modified_base 18: mod_base = OTHER; note = 2'-fluoro modified nucleotide with phosphorothioate linkage
  misc_difference 19: note = 2'-O-methyl modified nucleotide may be attached to trivalent N-Acetylgalactosamine
tgggcttctgcttctccag

SEQ ID NO: 824 - RNA, 19 nt, synthetic construct
  source 1..19: mol_type = other RNA
  misc_difference 1: note = 2'-O-methyl modified nucleotide with phosphorothioate linkage may be modified with 5'-Phosphate
  modified_base 2: mod_base = OTHER; note = 2'-fluoro modified nucleotide with phosphorothioate linkage
  modified_base 3: mod_base = OTHER; note = 2'-O-methyl modified nucleotide
  modified_base 4: mod_base = OTHER; note = 2'-fluoro modified nucleotide
  modified_base 5: mod_base = OTHER; note = 2'-O-methyl modified nucleotide
  modified_base 6: mod_base = OTHER; note = 2'-fluoro modified nucleotide
  modified_base 7: mod_base = OTHER; note = 2'-O-methyl modified nucleotide
  modified_base 8: mod_base = OTHER; note = 2'-fluoro modified nucleotide
  modified_base 9: mod_base = OTHER; note = 2'-O-methyl modified nucleotide
  modified_base 10: mod_base = OTHER; note = 2'-fluoro modified nucleotide
  modified_base 11: mod_base = OTHER; note = 2'-O-methyl modified nucleotide
  modified_base 12: mod_base = OTHER; note = 2'-fluoro modified nucleotide
  modified_base 13: mod_base = OTHER; note = 2'-O-methyl modified nucleotide
  modified_base 14: mod_base = OTHER; note = 2'-fluoro modified nucleotide with phosphorothioate linkage
  modified_base 15: mod_base = OTHER; note = 2'-O-methyl modified nucleotide with phosphorothioate linkage
  modified_base 16: mod_base = OTHER; note = 2'-fluoro modified nucleotide with phosphorothioate linkage
  modified_base 17: mod_base = OTHER; note = 2'-O-methyl modified nucleotide with phosphorothioate linkage
  modified_base 18: mod_base = OTHER; note = 2'-fluoro modified nucleotide with phosphorothioate linkage
  misc_difference 19: note = 2'-O-methyl modified nucleotide may be attached to trivalent N-Acetylgalactosamine
tctggttttatggtgacct

SEQ ID NO: 825 - RNA, 19 nt, synthetic construct
  source 1..19: mol_type = other RNA
  misc_difference 1: note = 2'-O-methyl modified nucleotide with phosphorothioate linkage may be modified with 5'-Phosphate
  modified_base 2: mod_base = OTHER; note = 2'-fluoro modified nucleotide with phosphorothioate linkage
  modified_base 3: mod_base = OTHER; note = 2'-O-methyl modified nucleotide
  modified_base 4: mod_base = OTHER; note = 2'-fluoro modified nucleotide
  modified_base 5: mod_base = OTHER; note = 2'-O-methyl modified nucleotide
  modified_base 6: mod_base = OTHER; note = 2'-fluoro modified nucleotide
  modified_base 7: mod_base = OTHER; note = 2'-O-methyl modified nucleotide
  modified_base 8: mod_base = OTHER; note = 2'-fluoro modified nucleotide
  modified_base 9: mod_base = OTHER; note = 2'-O-methyl modified nucleotide
  modified_base 10: mod_base = OTHER; note = 2'-fluoro modified nucleotide
  modified_base 11: mod_base = OTHER; note = 2'-O-methyl modified nucleotide
  modified_base 12: mod_base = OTHER; note = 2'-fluoro modified nucleotide
  modified_base 13: mod_base = OTHER; note = 2'-O-methyl modified nucleotide
  modified_base 14: mod_base = OTHER; note = 2'-fluoro modified nucleotide with phosphorothioate linkage
  modified_base 15: mod_base = OTHER; note = 2'-O-methyl modified nucleotide with phosphorothioate linkage
  modified_base 16: mod_base = OTHER; note = 2'-fluoro modified nucleotide with phosphorothioate linkage
  modified_base 17: mod_base = OTHER; note = 2'-O-methyl modified nucleotide with phosphorothioate linkage
  modified_base 18: mod_base = OTHER; note = 2'-fluoro modified nucleotide with phosphorothioate linkage
  misc_difference 19: note = 2'-O-methyl modified nucleotide may be attached to trivalent N-Acetylgalactosamine
tggcacccaaagacaacca

SEQ ID NO: 826 - RNA, 19 nt, synthetic construct
  source 1..19: mol_type = other RNA
  misc_difference 1: note = 2'-O-methyl modified nucleotide with phosphorothioate linkage may be modified with 5'-Phosphate
  modified_base 2: mod_base = OTHER; note = 2'-fluoro modified nucleotide with phosphorothioate linkage
  modified_base 3: mod_base = OTHER; note = 2'-O-methyl modified nucleotide
  modified_base 4: mod_base = OTHER; note = 2'-fluoro modified nucleotide
  modified_base 5: mod_base = OTHER; note = 2'-O-methyl modified nucleotide
  modified_base 6: mod_base = OTHER; note = 2'-fluoro modified nucleotide
  modified_base 7: mod_base = OTHER; note = 2'-O-methyl modified nucleotide
  modified_base 8: mod_base = OTHER; note = 2'-fluoro modified nucleotide
  modified_base 9: mod_base = OTHER; note = 2'-O-methyl modified nucleotide
  modified_base 10: mod_base = OTHER; note = 2'-fluoro modified nucleotide
  modified_base 11: mod_base = OTHER; note = 2'-O-methyl modified nucleotide
  modified_base 12: mod_base = OTHER; note = 2'-fluoro modified nucleotide
  modified_base 13: mod_base = OTHER; note = 2'-O-methyl modified nucleotide
  modified_base 14: mod_base = OTHER; note = 2'-fluoro modified nucleotide with phosphorothioate linkage
  modified_base 15: mod_base = OTHER; note = 2'-O-methyl modified nucleotide with phosphorothioate linkage
  modified_base 16: mod_base = OTHER; note = 2'-fluoro modified nucleotide with phosphorothioate linkage
  modified_base 17: mod_base = OTHER; note = 2'-O-methyl modified nucleotide with phosphorothioate linkage
  modified_base 18: mod_base = OTHER; note = 2'-fluoro modified nucleotide with phosphorothioate linkage
  misc_difference 19: note = 2'-O-methyl modified nucleotide may be attached to trivalent N-Acetylgalactosamine
tagctcttggttctgccgg

SEQ ID NO: 827 - RNA, 19 nt, synthetic construct
  source 1..19: mol_type = other RNA
  misc_difference 1: note = 2'-O-methyl modified nucleotide with phosphorothioate linkage may be modified with 5'-Phosphate
  modified_base 2: mod_base = OTHER; note = 2'-fluoro modified nucleotide with phosphorothioate linkage
  modified_base 3: mod_base = OTHER; note = 2'-O-methyl modified nucleotide
  modified_base 4: mod_base = OTHER; note = 2'-fluoro modified nucleotide
  modified_base 5: mod_base = OTHER; note = 2'-O-methyl modified nucleotide
  modified_base 6: mod_base = OTHER; note = 2'-fluoro modified nucleotide
  modified_base 7: mod_base = OTHER; note = 2'-O-methyl modified nucleotide
  modified_base 8: mod_base = OTHER; note = 2'-fluoro modified nucleotide
  modified_base 9: mod_base = OTHER; note = 2'-O-methyl modified nucleotide
  modified_base 10: mod_base = OTHER; note = 2'-fluoro modified nucleotide
  modified_base 11: mod_base = OTHER; note = 2'-O-methyl modified nucleotide
  modified_base 12: mod_base = OTHER; note = 2'-fluoro modified nucleotide
  modified_base 13: mod_base = OTHER; note = 2'-O-methyl modified nucleotide
  modified_base 14: mod_base = OTHER; note = 2'-fluoro modified nucleotide with phosphorothioate linkage
  modified_base 15: mod_base = OTHER; note = 2'-O-methyl modified nucleotide with phosphorothioate linkage
  modified_base 16: mod_base = OTHER; note = 2'-fluoro modified nucleotide with phosphorothioate linkage
  modified_base 17: mod_base = OTHER; note = 2'-O-methyl modified nucleotide with phosphorothioate linkage
  modified_base 18: mod_base = OTHER; note = 2'-fluoro modified nucleotide with phosphorothioate linkage
  misc_difference 19: note = 2'-O-methyl modified nucleotide may be attached to trivalent N-Acetylgalactosamine
tggaagttgacgttgaggg

SEQ ID NO: 828 - RNA, 19 nt, synthetic construct
  source 1..19: mol_type = other RNA
  misc_difference 1: note = 2'-O-methyl modified nucleotide with phosphorothioate linkage may be modified with 5'-Phosphate
  modified_base 2: mod_base = OTHER; note = 2'-fluoro modified nucleotide with phosphorothioate linkage
  modified_base 3: mod_base = OTHER; note = 2'-O-methyl modified nucleotide
  modified_base 4: mod_base = OTHER; note = 2'-fluoro modified nucleotide
  modified_base 5: mod_base = OTHER; note = 2'-O-methyl modified nucleotide
  modified_base 6: mod_base = OTHER; note = 2'-fluoro modified nucleotide
  modified_base 7: mod_base = OTHER; note = 2'-O-methyl modified nucleotide
  modified_base 8: mod_base = OTHER; note = 2'-fluoro modified nucleotide
  modified_base 9: mod_base = OTHER; note = 2'-O-methyl modified nucleotide
  modified_base 10: mod_base = OTHER; note = 2'-fluoro modified nucleotide
  modified_base 11: mod_base = OTHER; note = 2'-O-methyl modified nucleotide
  modified_base 12: mod_base = OTHER; note = 2'-fluoro modified nucleotide
  modified_base 13: mod_base = OTHER; note = 2'-O-methyl modified nucleotide
  modified_base 14: mod_base = OTHER; note = 2'-fluoro modified nucleotide with phosphorothioate linkage
  modified_base 15: mod_base = OTHER; note = 2'-O-methyl modified nucleotide with phosphorothioate linkage
  modified_base 16: mod_base = OTHER; note = 2'-fluoro modified nucleotide with phosphorothioate linkage
  modified_base 17: mod_base = OTHER; note = 2'-O-methyl modified nucleotide with phosphorothioate linkage
  modified_base 18: mod_base = OTHER; note = 2'-fluoro modified nucleotide with phosphorothioate linkage
  misc_difference 19: note = 2'-O-methyl modified nucleotide may be attached to trivalent N-Acetylgalactosamine
tgcagagctgggttgtctg

SEQ ID NO: 829 - RNA, 19 nt, synthetic construct
  source 1..19: mol_type = other RNA
  misc_difference 1: note = 2'-O-methyl modified nucleotide with phosphorothioate linkage may be modified with 5'-Phosphate
  modified_base 2: mod_base = OTHER; note = 2'-fluoro modified nucleotide with phosphorothioate linkage
  modified_base 3: mod_base = OTHER; note = 2'-O-methyl modified nucleotide
  modified_base 4: mod_base = OTHER; note = 2'-fluoro modified nucleotide
  modified_base 5: mod_base = OTHER; note = 2'-O-methyl modified nucleotide
  modified_base 6: mod_base = OTHER; note = 2'-fluoro modified nucleotide
  modified_base 7: mod_base = OTHER; note = 2'-O-methyl modified nucleotide
  modified_base 8: mod_base = OTHER; note = 2'-fluoro modified nucleotide
  modified_base 9: mod_base = OTHER; note = 2'-O-methyl modified nucleotide
  modified_base 10: mod_base = OTHER; note = 2'-fluoro modified nucleotide
  modified_base 11: mod_base = OTHER; note = 2'-O-methyl modified nucleotide
  modified_base 12: mod_base = OTHER; note = 2'-fluoro modified nucleotide
  modified_base 13: mod_base = OTHER; note = 2'-O-methyl modified nucleotide
  modified_base 14: mod_base = OTHER; note = 2'-fluoro modified nucleotide with phosphorothioate linkage
  modified_base 15: mod_base = OTHER; note = 2'-O-methyl modified nucleotide with phosphorothioate linkage
  modified_base 16: mod_base = OTHER; note = 2'-fluoro modified nucleotide with phosphorothioate linkage
  modified_base 17: mod_base = OTHER; note = 2'-O-methyl modified nucleotide with phosphorothioate linkage
  modified_base 18: mod_base = OTHER; note = 2'-fluoro modified nucleotide with phosphorothioate linkage
  misc_difference 19: note = 2'-O-methyl modified nucleotide may be attached to trivalent N-Acetylgalactosamine
tatagtccactcctggctc

SEQ ID NO: 830 - RNA, 19 nt, synthetic construct
  source 1..19: mol_type = other RNA
  misc_difference 1: note = 2'-O-methyl modified nucleotide with phosphorothioate linkage may be modified with 5'-Phosphate
  modified_base 2: mod_base = OTHER; note = 2'-fluoro modified nucleotide with phosphorothioate linkage
  modified_base 3: mod_base = OTHER; note = 2'-O-methyl modified nucleotide
  modified_base 4: mod_base = OTHER; note = 2'-fluoro modified nucleotide
  modified_base 5: mod_base = OTHER; note = 2'-O-methyl modified nucleotide
  modified_base 6: mod_base = OTHER; note = 2'-fluoro modified nucleotide
  modified_base 7: mod_base = OTHER; note = 2'-O-methyl modified nucleotide
  modified_base 8: mod_base = OTHER; note = 2'-fluoro modified nucleotide
  modified_base 9: mod_base = OTHER; note = 2'-O-methyl modified nucleotide
  modified_base 10: mod_base = OTHER; note = 2'-fluoro modified nucleotide
  modified_base 11: mod_base = OTHER; note = 2'-O-methyl modified nucleotide
  modified_base 12: mod_base = OTHER; note = 2'-fluoro modified nucleotide
  modified_base 13: mod_base = OTHER; note = 2'-O-methyl modified nucleotide
  modified_base 14: mod_base = OTHER; note = 2'-fluoro modified nucleotide with phosphorothioate linkage
  modified_base 15: mod_base = OTHER; note = 2'-O-methyl modified nucleotide with phosphorothioate linkage
  modified_base 16: mod_base = OTHER; note = 2'-fluoro modified nucleotide with phosphorothioate linkage
  modified_base 17: mod_base = OTHER; note = 2'-O-methyl modified nucleotide with phosphorothioate linkage
  modified_base 18: mod_base = OTHER; note = 2'-fluoro modified nucleotide with phosphorothioate linkage
  misc_difference 19: note = 2'-O-methyl modified nucleotide may be attached to trivalent N-Acetylgalactosamine
ttcgaatttattacaggtg

SEQ ID NO: 831 - RNA, 19 nt, synthetic construct
  source 1..19: mol_type = other RNA
  misc_difference 1: note = 2'-O-methyl modified nucleotide with phosphorothioate linkage may be modified with 5'-Phosphate
  modified_base 2: mod_base = OTHER; note = 2'-fluoro modified nucleotide with phosphorothioate linkage
  modified_base 3: mod_base = OTHER; note = 2'-O-methyl modified nucleotide
  modified_base 4: mod_base = OTHER; note = 2'-fluoro modified nucleotide
  modified_base 5: mod_base = OTHER; note = 2'-O-methyl modified nucleotide
  modified_base 6: mod_base = OTHER; note = 2'-fluoro modified nucleotide
  modified_base 7: mod_base = OTHER; note = 2'-O-methyl modified nucleotide
  modified_base 8: mod_base = OTHER; note = 2'-fluoro modified nucleotide
  modified_base 9: mod_base = OTHER; note = 2'-O-methyl modified nucleotide
  modified_base 10: mod_base = OTHER; note = 2'-fluoro modified nucleotide
  modified_base 11: mod_base = OTHER; note = 2'-O-methyl modified nucleotide
  modified_base 12: mod_base = OTHER; note = 2'-fluoro modified nucleotide
  modified_base 13: mod_base = OTHER; note = 2'-O-methyl modified nucleotide
  modified_base 14: mod_base = OTHER; note = 2'-fluoro modified nucleotide with phosphorothioate linkage
  modified_base 15: mod_base = OTHER; note = 2'-O-methyl modified nucleotide with phosphorothioate linkage
  modified_base 16: mod_base = OTHER; note = 2'-fluoro modified nucleotide with phosphorothioate linkage
  modified_base 17: mod_base = OTHER; note = 2'-O-methyl modified nucleotide with phosphorothioate linkage
  modified_base 18: mod_base = OTHER; note = 2'-fluoro modified nucleotide with phosphorothioate linkage
  misc_difference 19: note = 2'-O-methyl modified nucleotide may be attached to trivalent N-Acetylgalactosamine
tagaatttctctgtaggct

SEQ ID NO: 832 - RNA, 19 nt, synthetic construct
  source 1..19: mol_type = other RNA
  misc_difference 1: note = 2'-O-methyl modified nucleotide with phosphorothioate linkage may be modified with 5'-Phosphate
  modified_base 2: mod_base = OTHER; note = 2'-fluoro modified nucleotide with phosphorothioate linkage
  modified_base 3: mod_base = OTHER; note = 2'-O-methyl modified nucleotide
  modified_base 4: mod_base = OTHER; note = 2'-fluoro modified nucleotide
  modified_base 5: mod_base = OTHER; note = 2'-O-methyl modified nucleotide
  modified_base 6: mod_base = OTHER; note = 2'-fluoro modified nucleotide
  modified_base 7: mod_base = OTHER; note = 2'-O-methyl modified nucleotide
  modified_base 8: mod_base = OTHER; note = 2'-fluoro modified nucleotide
  modified_base 9: mod_base = OTHER; note = 2'-O-methyl modified nucleotide
  modified_base 10: mod_base = OTHER; note = 2'-fluoro modified nucleotide
  modified_base 11: mod_base = OTHER; note = 2'-O-methyl modified nucleotide
  modified_base 12: mod_base = OTHER; note = 2'-fluoro modified nucleotide
  modified_base 13: mod_base = OTHER; note = 2'-O-methyl modified nucleotide
  modified_base 14: mod_base = OTHER; note = 2'-fluoro modified nucleotide with phosphorothioate linkage
  modified_base 15: mod_base = OTHER; note = 2'-O-methyl modified nucleotide with phosphorothioate linkage
  modified_base 16: mod_base = OTHER; note = 2'-fluoro modified nucleotide with phosphorothioate linkage
  modified_base 17: mod_base = OTHER; note = 2'-O-methyl modified nucleotide with phosphorothioate linkage
  modified_base 18: mod_base = OTHER; note = 2'-fluoro modified nucleotide with phosphorothioate linkage
  misc_difference 19: note = 2'-O-methyl modified nucleotide may be attached to trivalent N-Acetylgalactosamine
tagtgttcttggcatcctg

SEQ ID NO: 833 - RNA, 19 nt, synthetic construct
  source 1..19: mol_type = other RNA
  misc_difference 1: note = 2'-O-methyl modified nucleotide with phosphorothioate linkage may be modified with 5'-Phosphate
  modified_base 2: mod_base = OTHER; note = 2'-fluoro modified nucleotide with phosphorothioate linkage
  modified_base 3: mod_base = OTHER; note = 2'-O-methyl modified nucleotide
  modified_base 4: mod_base = OTHER; note = 2'-fluoro modified nucleotide
  modified_base 5: mod_base = OTHER; note = 2'-O-methyl modified nucleotide
  modified_base 6: mod_base = OTHER; note = 2'-fluoro modified nucleotide
  modified_base 7: mod_base = OTHER; note = 2'-O-methyl modified nucleotide
  modified_base 8: mod_base = OTHER; note = 2'-fluoro modified nucleotide
  modified_base 9: mod_base = OTHER; note = 2'-O-methyl modified nucleotide
  modified_base 10: mod_base = OTHER; note = 2'-fluoro modified nucleotide
  modified_base 11: mod_base = OTHER; note = 2'-O-methyl modified nucleotide
  modified_base 12: mod_base = OTHER; note = 2'-fluoro modified nucleotide
  modified_base 13: mod_base = OTHER; note = 2'-O-methyl modified nucleotide
  modified_base 14: mod_base = OTHER; note = 2'-fluoro modified nucleotide with phosphorothioate linkage
  modified_base 15: mod_base = OTHER; note = 2'-O-methyl modified nucleotide with phosphorothioate linkage
  modified_base 16: mod_base = OTHER; note = 2'-fluoro modified nucleotide with phosphorothioate linkage
  modified_base 17: mod_base = OTHER; note = 2'-O-methyl modified nucleotide with phosphorothioate linkage
  modified_base 18: mod_base = OTHER; note = 2'-fluoro modified nucleotide with phosphorothioate linkage
  misc_difference 19: note = 2'-O-methyl modified nucleotide may be attached to trivalent N-Acetylgalactosamine
tgaaacgatgttctcttct

SEQ ID NO: 834 - RNA, 19 nt, synthetic construct
  source 1..19: mol_type = other RNA
  misc_difference 1: note = 2'-O-methyl modified nucleotide with phosphorothioate linkage may be modified with 5'-Phosphate
  modified_base 2: mod_base = OTHER; note = 2'-fluoro modified nucleotide with phosphorothioate linkage
  modified_base 3: mod_base = OTHER; note = 2'-O-methyl modified nucleotide
  modified_base 4: mod_base = OTHER; note = 2'-fluoro modified nucleotide
  modified_base 5: mod_base = OTHER; note = 2'-O-methyl modified nucleotide
  modified_base 6: mod_base = OTHER; note = 2'-fluoro modified nucleotide
  modified_base 7: mod_base = OTHER; note = 2'-O-methyl modified nucleotide
  modified_base 8: mod_base = OTHER; note = 2'-fluoro modified nucleotide
  modified_base 9: mod_base = OTHER; note = 2'-O-methyl modified nucleotide
  modified_base 10: mod_base = OTHER; note = 2'-fluoro modified nucleotide
  modified_base 11: mod_base = OTHER; note = 2'-O-methyl modified nucleotide
  modified_base 12: mod_base = OTHER; note = 2'-fluoro modified nucleotide
  modified_base 13: mod_base = OTHER; note = 2'-O-methyl modified nucleotide
  modified_base 14: mod_base = OTHER; note = 2'-fluoro modified nucleotide with phosphorothioate linkage
  modified_base 15: mod_base = OTHER; note = 2'-O-methyl modified nucleotide with phosphorothioate linkage
  modified_base 16: mod_base = OTHER; note = 2'-fluoro modified nucleotide with phosphorothioate linkage
  modified_base 17: mod_base = OTHER; note = 2'-O-methyl modified nucleotide with phosphorothioate linkage
  modified_base 18: mod_base = OTHER; note = 2'-fluoro modified nucleotide with phosphorothioate linkage
  misc_difference 19: note = 2'-O-methyl modified nucleotide may be attached to trivalent N-Acetylgalactosamine
tagtaggctcggatcttcc

SEQ ID NO: 835 - RNA, 19 nt, synthetic construct
  source 1..19: mol_type = other RNA
  misc_difference 1: note = 2'-O-methyl modified nucleotide with phosphorothioate linkage may be modified with 5'-Phosphate
  modified_base 2: mod_base = OTHER; note = 2'-fluoro modified nucleotide with phosphorothioate linkage
  modified_base 3: mod_base = OTHER; note = 2'-O-methyl modified nucleotide
  modified_base 4: mod_base = OTHER; note = 2'-fluoro modified nucleotide
  modified_base 5: mod_base = OTHER; note = 2'-O-methyl modified nucleotide
  modified_base 6: mod_base = OTHER; note = 2'-fluoro modified nucleotide
  modified_base 7: mod_base = OTHER; note = 2'-O-methyl modified nucleotide
  modified_base 8: mod_base = OTHER; note = 2'-fluoro modified nucleotide
  modified_base 9: mod_base = OTHER; note = 2'-O-methyl modified nucleotide
  modified_base 10: mod_base = OTHER; note = 2'-fluoro modified nucleotide
  modified_base 11: mod_base = OTHER; note = 2'-O-methyl modified nucleotide
  modified_base 12: mod_base = OTHER; note = 2'-fluoro modified nucleotide
  modified_base 13: mod_base = OTHER; note = 2'-O-methyl modified nucleotide
  modified_base 14: mod_base = OTHER; note = 2'-fluoro modified nucleotide with phosphorothioate linkage
  modified_base 15: mod_base = OTHER; note = 2'-O-methyl modified nucleotide with phosphorothioate linkage
  modified_base 16: mod_base = OTHER; note = 2'-fluoro modified nucleotide with phosphorothioate linkage
  modified_base 17: mod_base = OTHER; note = 2'-O-methyl modified nucleotide with phosphorothioate linkage
  modified_base 18: mod_base = OTHER; note = 2'-fluoro modified nucleotide with phosphorothioate linkage
  misc_difference 19: note = 2'-O-methyl modified nucleotide may be attached to trivalent N-Acetylgalactosamine
ttctcctcagcacagcggc

SEQ ID NO: 836 - RNA, 19 nt, synthetic construct
  source 1..19: mol_type = other RNA
  misc_difference 1: note = 2'-O-methyl modified nucleotide with phosphorothioate linkage may be modified with 5'-Phosphate
  modified_base 2: mod_base = OTHER; note = 2'-fluoro modified nucleotide with phosphorothioate linkage
  modified_base 3: mod_base = OTHER; note = 2'-O-methyl modified nucleotide
  modified_base 4: mod_base = OTHER; note = 2'-fluoro modified nucleotide
  modified_base 5: mod_base = OTHER; note = 2'-O-methyl modified nucleotide
  modified_base 6: mod_base = OTHER; note = 2'-fluoro modified nucleotide
  modified_base 7: mod_base = OTHER; note = 2'-O-methyl modified nucleotide
  modified_base 8: mod_base = OTHER; note = 2'-fluoro modified nucleotide
  modified_base 9: mod_base = OTHER; note = 2'-O-methyl modified nucleotide
  modified_base 10: mod_base = OTHER; note = 2'-fluoro modified nucleotide
  modified_base 11: mod_base = OTHER; note = 2'-O-methyl modified nucleotide
  modified_base 12: mod_base = OTHER; note = 2'-fluoro modified nucleotide
  modified_base 13: mod_base = OTHER; note = 2'-O-methyl modified nucleotide
  modified_base 14: mod_base = OTHER; note = 2'-fluoro modified nucleotide with phosphorothioate linkage
  modified_base 15: mod_base = OTHER; note = 2'-O-methyl modified nucleotide with phosphorothioate linkage
  modified_base 16: mod_base = OTHER; note = 2'-fluoro modified nucleotide with phosphorothioate linkage
  modified_base 17: mod_base = OTHER; note = 2'-O-methyl modified nucleotide with phosphorothioate linkage
  modified_base 18: mod_base = OTHER; note = 2'-fluoro modified nucleotide with phosphorothioate linkage
  misc_difference 19: note = 2'-O-methyl modified nucleotide may be attached to trivalent N-Acetylgalactosamine
ttgcgcaccgtgatgctca

SEQ ID NO: 837 - RNA, 19 nt, synthetic construct
  source 1..19: mol_type = other RNA
  misc_difference 1: note = 2'-O-methyl modified nucleotide with phosphorothioate linkage may be modified with 5'-Phosphate
  modified_base 2: mod_base = OTHER; note = 2'-fluoro modified nucleotide with phosphorothioate linkage
  modified_base 3: mod_base = OTHER; note = 2'-O-methyl modified nucleotide
  modified_base 4: mod_base = OTHER; note = 2'-fluoro modified nucleotide
  modified_base 5: mod_base = OTHER; note = 2'-O-methyl modified nucleotide
  modified_base 6: mod_base = OTHER; note = 2'-fluoro modified nucleotide
  modified_base 7: mod_base = OTHER; note = 2'-O-methyl modified nucleotide
  modified_base 8: mod_base = OTHER; note = 2'-fluoro modified nucleotide
  modified_base 9: mod_base = OTHER; note = 2'-O-methyl modified nucleotide
  modified_base 10: mod_base = OTHER; note = 2'-fluoro modified nucleotide
  modified_base 11: mod_base = OTHER; note = 2'-O-methyl modified nucleotide
  modified_base 12: mod_base = OTHER; note = 2'-fluoro modified nucleotide
  modified_base 13: mod_base = OTHER; note = 2'-O-methyl modified nucleotide
  modified_base 14: mod_base = OTHER; note = 2'-fluoro modified nucleotide with phosphorothioate linkage
  modified_base 15: mod_base = OTHER; note = 2'-O-methyl modified nucleotide with phosphorothioate linkage
  modified_base 16: mod_base = OTHER; note = 2'-fluoro modified nucleotide with phosphorothioate linkage
  modified_base 17: mod_base = OTHER; note = 2'-O-methyl modified nucleotide with phosphorothioate linkage
  modified_base 18: mod_base = OTHER; note = 2'-fluoro modified nucleotide with phosphorothioate linkage
  misc_difference 19: note = 2'-O-methyl modified nucleotide may be attached to trivalent N-Acetylgalactosamine
ttgtactcgtcaaagtcat

SEQ ID NO: 838 - RNA, 19 nt, synthetic construct
  source 1..19: mol_type = other RNA
  misc_difference 1: note = 2'-O-methyl modified nucleotide with phosphorothioate linkage may be modified with 5'-Phosphate
  modified_base 2: mod_base = OTHER; note = 2'-fluoro modified nucleotide with phosphorothioate linkage
  modified_base 3: mod_base = OTHER; note = 2'-O-methyl modified nucleotide
  modified_base 4: mod_base = OTHER; note = 2'-fluoro modified nucleotide
  modified_base 5: mod_base = OTHER; note = 2'-O-methyl modified nucleotide
  modified_base 6: mod_base = OTHER; note = 2'-fluoro modified nucleotide
  modified_base 7: mod_base = OTHER; note = 2'-O-methyl modified nucleotide
  modified_base 8: mod_base = OTHER; note = 2'-fluoro modified nucleotide
  modified_base 9: mod_base = OTHER; note = 2'-O-methyl modified nucleotide
  modified_base 10: mod_base = OTHER; note = 2'-fluoro modified nucleotide
  modified_base 11: mod_base = OTHER; note = 2'-O-methyl modified nucleotide
  modified_base 12: mod_base = OTHER; note = 2'-fluoro modified nucleotide
  modified_base 13: mod_base = OTHER; note = 2'-O-methyl modified nucleotide
  modified_base 14: mod_base = OTHER; note = 2'-fluoro modified nucleotide with phosphorothioate linkage
  modified_base 15: mod_base = OTHER; note = 2'-O-methyl modified nucleotide with phosphorothioate linkage
  modified_base 16: mod_base = OTHER; note = 2'-fluoro modified nucleotide with phosphorothioate linkage
  modified_base 17: mod_base = OTHER; note = 2'-O-methyl modified nucleotide with phosphorothioate linkage
  modified_base 18: mod_base = OTHER; note = 2'-fluoro modified nucleotide with phosphorothioate linkage
  misc_difference 19: note = 2'-O-methyl modified nucleotide may be attached to trivalent N-Acetylgalactosamine
tccgtgagggccatgtctt

SEQ ID NO: 839 - RNA, 19 nt, synthetic construct
  source 1..19: mol_type = other RNA
  misc_difference 1: note = 2'-O-methyl modified nucleotide with phosphorothioate linkage may be modified with 5'-Phosphate
  modified_base 2: mod_base = OTHER; note = 2'-fluoro modified nucleotide with phosphorothioate linkage
  modified_base 3: mod_base = OTHER; note = 2'-O-methyl modified nucleotide
  modified_base 4: mod_base = OTHER; note = 2'-fluoro modified nucleotide
  modified_base 5: mod_base = OTHER; note = 2'-O-methyl modified nucleotide
  modified_base 6: mod_base = OTHER; note = 2'-fluoro modified nucleotide
  modified_base 7: mod_base = OTHER; note = 2'-O-methyl modified nucleotide
  modified_base 8: mod_base = OTHER; note = 2'-fluoro modified nucleotide
  modified_base 9: mod_base = OTHER; note = 2'-O-methyl modified nucleotide
  modified_base 10: mod_base = OTHER; note = 2'-fluoro modified nucleotide
  modified_base 11: mod_base = OTHER; note = 2'-O-methyl modified nucleotide
  modified_base 12: mod_base = OTHER; note = 2'-fluoro modified nucleotide
  modified_base 13: mod_base = OTHER; note = 2'-O-methyl modified nucleotide
  modified_base 14: mod_base = OTHER; note = 2'-fluoro modified nucleotide with phosphorothioate linkage
  modified_base 15: mod_base = OTHER; note = 2'-O-methyl modified nucleotide with phosphorothioate linkage
  modified_base 16: mod_base = OTHER; note = 2'-fluoro modified nucleotide with phosphorothioate linkage
  modified_base 17: mod_base = OTHER; note = 2'-O-methyl modified nucleotide with phosphorothioate linkage
  modified_base 18: mod_base = OTHER; note = 2'-fluoro modified nucleotide with phosphorothioate linkage
  misc_difference 19: note = 2'-O-methyl modified nucleotide may be attached to trivalent N-Acetylgalactosamine
tggttctcaatgttgacca

SEQ ID NO: 840 - RNA, 19 nt, synthetic construct
  source 1..19: mol_type = other RNA
  misc_difference 1: note = 2'-O-methyl modified nucleotide with phosphorothioate linkage may be modified with 5'-Phosphate
  modified_base 2: mod_base = OTHER; note = 2'-fluoro modified nucleotide with phosphorothioate linkage
  modified_base 3: mod_base = OTHER; note = 2'-O-methyl modified nucleotide
  modified_base 4: mod_base = OTHER; note = 2'-fluoro modified nucleotide
  modified_base 5: mod_base = OTHER; note = 2'-O-methyl modified nucleotide
  modified_base 6: mod_base = OTHER; note = 2'-fluoro modified nucleotide
  modified_base 7: mod_base = OTHER; note = 2'-O-methyl modified nucleotide
  modified_base 8: mod_base = OTHER; note = 2'-fluoro modified nucleotide
  modified_base 9: mod_base = OTHER; note = 2'-O-methyl modified nucleotide
  modified_base 10: mod_base = OTHER; note = 2'-fluoro modified nucleotide
  modified_base 11: mod_base = OTHER; note = 2'-O-methyl modified nucleotide
  modified_base 12: mod_base = OTHER; note = 2'-fluoro modified nucleotide
  modified_base 13: mod_base = OTHER; note = 2'-O-methyl modified nucleotide
  modified_base 14: mod_base = OTHER; note = 2'-fluoro modified nucleotide with phosphorothioate linkage
  modified_base 15: mod_base = OTHER; note = 2'-O-methyl modified nucleotide with phosphorothioate linkage
  modified_base 16: mod_base = OTHER; note = 2'-fluoro modified nucleotide with phosphorothioate linkage
  modified_base 17: mod_base = OTHER; note = 2'-O-methyl modified nucleotide with phosphorothioate linkage
  modified_base 18: mod_base = OTHER; note = 2'-fluoro modified nucleotide with phosphorothioate linkage
  misc_difference 19: note = 2'-O-methyl modified nucleotide may be attached to trivalent N-Acetylgalactosamine
tctgacaccgtcactgatg

SEQ ID NO: 841 - RNA, 19 nt, synthetic construct
  source 1..19: mol_type = other RNA
  misc_difference 1: note = 2'-O-methyl modified nucleotide with phosphorothioate linkage may be modified with 5'-Phosphate
  modified_base 2: mod_base = OTHER; note = 2'-fluoro modified nucleotide with phosphorothioate linkage
  modified_base 3: mod_base = OTHER; note = 2'-O-methyl modified nucleotide
  modified_base 4: mod_base = OTHER; note = 2'-fluoro modified nucleotide
  modified_base 5: mod_base = OTHER; note = 2'-O-methyl modified nucleotide
  modified_base 6: mod_base = OTHER; note = 2'-fluoro modified nucleotide
  modified_base 7: mod_base = OTHER; note = 2'-O-methyl modified nucleotide
  modified_base 8: mod_base = OTHER; note = 2'-fluoro modified nucleotide
  modified_base 9: mod_base = OTHER; note = 2'-O-methyl modified nucleotide
  modified_base 10: mod_base = OTHER; note = 2'-fluoro modified nucleotide
  modified_base 11: mod_base = OTHER; note = 2'-O-methyl modified nucleotide
  modified_base 12: mod_base = OTHER; note = 2'-fluoro modified nucleotide
  modified_base 13: mod_base = OTHER; note = 2'-O-methyl modified nucleotide
  modified_base 14: mod_base = OTHER; note = 2'-fluoro modified nucleotide with phosphorothioate linkage
  modified_base 15: mod_base = OTHER; note = 2'-O-methyl modified nucleotide with phosphorothioate linkage
  modified_base 16: mod_base = OTHER; note = 2'-fluoro modified nucleotide with phosphorothioate linkage
  modified_base 17: mod_base = OTHER; note = 2'-O-methyl modified nucleotide with phosphorothioate linkage
  modified_base 18: mod_base = OTHER; note = 2'-fluoro modified nucleotide with phosphorothioate linkage
  misc_difference 19: note = 2'-O-methyl modified nucleotide may be attached to trivalent N-Acetylgalactosamine
tatgacctcgaaactgggc

SEQ ID NO: 842 - RNA, 19 nt, synthetic construct
  source 1..19: mol_type = other RNA
  misc_difference 1: note = 2'-O-methyl modified nucleotide with phosphorothioate linkage may be modified with 5'-Phosphate
  modified_base 2: mod_base = OTHER; note = 2'-fluoro modified nucleotide with phosphorothioate linkage
  modified_base 3: mod_base = OTHER; note = 2'-O-methyl modified nucleotide
  modified_base 4: mod_base = OTHER; note = 2'-fluoro modified nucleotide
  modified_base 5: mod_base = OTHER; note = 2'-O-methyl modified nucleotide
  modified_base 6: mod_base = OTHER; note = 2'-fluoro modified nucleotide
  modified_base 7: mod_base = OTHER; note = 2'-O-methyl modified nucleotide
  modified_base 8: mod_base = OTHER; note = 2'-fluoro modified nucleotide
  modified_base 9: mod_base = OTHER; note = 2'-O-methyl modified nucleotide
  modified_base 10: mod_base = OTHER; note = 2'-fluoro modified nucleotide
  modified_base 11: mod_base = OTHER; note = 2'-O-methyl modified nucleotide
  modified_base 12: mod_base = OTHER; note = 2'-fluoro modified nucleotide
  modified_base 13: mod_base = OTHER; note = 2'-O-methyl modified nucleotide
  modified_base 14: mod_base = OTHER; note = 2'-fluoro modified nucleotide with phosphorothioate linkage
  modified_base 15: mod_base = OTHER; note = 2'-O-methyl modified nucleotide with phosphorothioate linkage
  modified_base 16: mod_base = OTHER; note = 2'-fluoro modified nucleotide with phosphorothioate linkage
  modified_base 17: mod_base = OTHER; note = 2'-O-methyl modified nucleotide with phosphorothioate linkage
  modified_base 18: mod_base = OTHER; note = 2'-fluoro modified nucleotide with phosphorothioate linkage
  misc_difference 19: note = 2'-O-methyl modified nucleotide may be attached to trivalent N-Acetylgalactosamine
ttgaggtcgaatttattac

SEQ ID NO: 843 - RNA, 19 nt, synthetic construct
  source 1..19: mol_type = other RNA
  misc_difference 1: note = 2'-O-methyl modified nucleotide with phosphorothioate linkage may be modified with 5'-Phosphate
  modified_base 2: mod_base = OTHER; note = 2'-fluoro modified nucleotide with phosphorothioate linkage
  modified_base 3: mod_base = OTHER; note = 2'-O-methyl modified nucleotide
  modified_base 4: mod_base = OTHER; note = 2'-fluoro modified nucleotide
  modified_base 5: mod_base = OTHER; note = 2'-O-methyl modified nucleotide
  modified_base 6: mod_base = OTHER; note = 2'-fluoro modified nucleotide
  modified_base 7: mod_base = OTHER; note = 2'-O-methyl modified nucleotide
  modified_base 8: mod_base = OTHER; note = 2'-fluoro modified nucleotide
  modified_base 9: mod_base = OTHER; note = 2'-O-methyl modified nucleotide
  modified_base 10: mod_base = OTHER; note = 2'-fluoro modified nucleotide
  modified_base 11: mod_base = OTHER; note = 2'-O-methyl modified nucleotide
  modified_base 12: mod_base = OTHER; note = 2'-fluoro modified nucleotide
  modified_base 13: mod_base = OTHER; note = 2'-O-methyl modified nucleotide
  modified_base 14: mod_base = OTHER; note = 2'-fluoro modified nucleotide with phosphorothioate linkage
  modified_base 15: mod_base = OTHER; note = 2'-O-methyl modified nucleotide with phosphorothioate linkage
  modified_base 16: mod_base = OTHER; note = 2'-fluoro modified nucleotide with phosphorothioate linkage
  modified_base 17: mod_base = OTHER; note = 2'-O-methyl modified nucleotide with phosphorothioate linkage
  modified_base 18: mod_base = OTHER; note = 2'-fluoro modified nucleotide with phosphorothioate linkage
  misc_difference 19: note = 2'-O-methyl modified nucleotide may be attached to trivalent N-Acetylgalactosamine
tctcattttccttggtctc

SEQ ID NO: 844 - RNA, 19 nt, synthetic construct
  source 1..19: mol_type = other RNA
  misc_difference 1: note = 2'-O-methyl modified nucleotide with phosphorothioate linkage may be modified with 5'-Phosphate
  modified_base 2: mod_base = OTHER; note = 2'-fluoro modified nucleotide with phosphorothioate linkage
  modified_base 3: mod_base = OTHER; note = 2'-O-methyl modified nucleotide
  modified_base 4: mod_base = OTHER; note = 2'-fluoro modified nucleotide
  modified_base 5: mod_base = OTHER; note = 2'-O-methyl modified nucleotide
  modified_base 6: mod_base = OTHER; note = 2'-fluoro modified nucleotide
  modified_base 7: mod_base = OTHER; note = 2'-O-methyl modified nucleotide
  modified_base 8: mod_base = OTHER; note = 2'-fluoro modified nucleotide
  modified_base 9: mod_base = OTHER; note = 2'-O-methyl modified nucleotide
  modified_base 10: mod_base = OTHER; note = 2'-fluoro modified nucleotide
  modified_base 11: mod_base = OTHER; note = 2'-O-methyl modified nucleotide
  modified_base 12: mod_base = OTHER; note = 2'-fluoro modified nucleotide
  modified_base 13: mod_base = OTHER; note = 2'-O-methyl modified nucleotide
  modified_base 14: mod_base = OTHER; note = 2'-fluoro modified nucleotide with phosphorothioate linkage
  modified_base 15: mod_base = OTHER; note = 2'-O-methyl modified nucleotide with phosphorothioate linkage
  modified_base 16: mod_base = OTHER; note = 2'-fluoro modified nucleotide with phosphorothioate linkage
  modified_base 17: mod_base = OTHER; note = 2'-O-methyl modified nucleotide with phosphorothioate linkage
  modified_base 18: mod_base = OTHER; note = 2'-fluoro modified nucleotide with phosphorothioate linkage
  misc_difference 19: note = 2'-O-methyl modified nucleotide may be attached to trivalent N-Acetylgalactosamine
tacttttgtatgaagcaat

SEQ ID NO: 845 - RNA, 19 nt, synthetic construct
  source 1..19: mol_type = other RNA
  misc_difference 1: note = 2'-O-methyl modified nucleotide with phosphorothioate linkage may be modified with 5'-Phosphate
  modified_base 2: mod_base = OTHER; note = 2'-fluoro modified nucleotide with phosphorothioate linkage
  modified_base 3: mod_base = OTHER; note = 2'-O-methyl modified nucleotide
  modified_base 4: mod_base = OTHER; note = 2'-fluoro modified nucleotide
  modified_base 5: mod_base = OTHER; note = 2'-O-methyl modified nucleotide
  modified_base 6: mod_base = OTHER; note = 2'-fluoro modified nucleotide
  modified_base 7: mod_base = OTHER; note = 2'-O-methyl modified nucleotide
  modified_base 8: mod_base = OTHER; note = 2'-fluoro modified nucleotide
  modified_base 9: mod_base = OTHER; note = 2'-O-methyl modified nucleotide
  modified_base 10: mod_base = OTHER; note = 2'-fluoro modified nucleotide
  modified_base 11: mod_base = OTHER; note = 2'-O-methyl modified nucleotide
  modified_base 12: mod_base = OTHER; note = 2'-fluoro modified nucleotide
  modified_base 13: mod_base = OTHER; note = 2'-O-methyl modified nucleotide
  modified_base 14: mod_base = OTHER; note = 2'-fluoro modified nucleotide with phosphorothioate linkage
  modified_base 15: mod_base = OTHER; note = 2'-O-methyl modified nucleotide with phosphorothioate linkage
  modified_base 16: mod_base = OTHER; note = 2'-fluoro modified nucleotide with phosphorothioate linkage
  modified_base 17: mod_base = OTHER; note = 2'-O-methyl modified nucleotide with phosphorothioate linkage
  modified_base 18: mod_base = OTHER; note = 2'-fluoro modified nucleotide with phosphorothioate linkage
  misc_difference 19: note = 2'-O-methyl modified nucleotide may be attached to trivalent N-Acetylgalactosamine
tgagtgtgagaccttgtcc

SEQ ID NO: 846 - RNA, 19 nt, synthetic construct
  source 1..19: mol_type = other RNA
  misc_difference 1: note = 2'-O-methyl modified nucleotide with phosphorothioate linkage may be modified with 5'-Phosphate
  modified_base 2: mod_base = OTHER; note = 2'-fluoro modified nucleotide with phosphorothioate linkage
  modified_base 3: mod_base = OTHER; note = 2'-O-methyl modified nucleotide
  modified_base 4: mod_base = OTHER; note = 2'-fluoro modified nucleotide
  modified_base 5: mod_base = OTHER; note = 2'-O-methyl modified nucleotide
  modified_base 6: mod_base = OTHER; note = 2'-fluoro modified nucleotide
  modified_base 7: mod_base = OTHER; note = 2'-O-methyl modified nucleotide
  modified_base 8: mod_base = OTHER; note = 2'-fluoro modified nucleotide
  modified_base 9: mod_base = OTHER; note = 2'-O-methyl modified nucleotide
  modified_base 10: mod_base = OTHER; note = 2'-fluoro modified nucleotide
  modified_base 11: mod_base = OTHER; note = 2'-O-methyl modified nucleotide
  modified_base 12: mod_base = OTHER; note = 2'-fluoro modified nucleotide
  modified_base 13: mod_base = OTHER; note = 2'-O-methyl modified nucleotide
  modified_base 14: mod_base = OTHER; note = 2'-fluoro modified nucleotide with phosphorothioate linkage
  modified_base 15: mod_base = OTHER; note = 2'-O-methyl modified nucleotide with phosphorothioate linkage
  modified_base 16: mod_base = OTHER; note = 2'-fluoro modified nucleotide with phosphorothioate linkage
  modified_base 17: mod_base = OTHER; note = 2'-O-methyl modified nucleotide with phosphorothioate linkage
  modified_base 18: mod_base = OTHER; note = 2'-fluoro modified nucleotide with phosphorothioate linkage
  misc_difference 19: note = 2'-O-methyl modified nucleotide may be attached to trivalent N-Acetylgalactosamine
tcgaatttattacaggtga

SEQ ID NO: 847 - RNA, 19 nt, synthetic construct
  source 1..19: mol_type = other RNA
  misc_difference 1: note = 2'-O-methyl modified nucleotide with phosphorothioate linkage may be modified with 5'-Phosphate
  modified_base 2: mod_base = OTHER; note = 2'-fluoro modified nucleotide with phosphorothioate linkage
  modified_base 3: mod_base = OTHER; note = 2'-O-methyl modified nucleotide
  modified_base 4: mod_base = OTHER; note = 2'-fluoro modified nucleotide
  modified_base 5: mod_base = OTHER; note = 2'-O-methyl modified nucleotide
  modified_base 6: mod_base = OTHER; note = 2'-fluoro modified nucleotide
  modified_base 7: mod_base = OTHER; note = 2'-O-methyl modified nucleotide
  modified_base 8: mod_base = OTHER; note = 2'-fluoro modified nucleotide
  modified_base 9: mod_base = OTHER; note = 2'-O-methyl modified nucleotide
  modified_base 10: mod_base = OTHER; note = 2'-fluoro modified nucleotide
  modified_base 11: mod_base = OTHER; note = 2'-O-methyl modified nucleotide
  modified_base 12: mod_base = OTHER; note = 2'-fluoro modified nucleotide
  modified_base 13: mod_base = OTHER; note = 2'-O-methyl modified nucleotide
  modified_base 14: mod_base = OTHER; note = 2'-fluoro modified nucleotide with phosphorothioate linkage
  modified_base 15: mod_base = OTHER; note = 2'-O-methyl modified nucleotide with phosphorothioate linkage
  modified_base 16: mod_base = OTHER; note = 2'-fluoro modified nucleotide with phosphorothioate linkage
  modified_base 17: mod_base = OTHER; note = 2'-O-methyl modified nucleotide with phosphorothioate linkage
  modified_base 18: mod_base = OTHER; note = 2'-fluoro modified nucleotide with phosphorothioate linkage
  misc_difference 19: note = 2'-O-methyl modified nucleotide may be attached to trivalent N-Acetylgalactosamine
tcaacctgcacctcatccg

SEQ ID NO: 848 - RNA, 19 nt, synthetic construct
  source 1..19: mol_type = other RNA
  misc_difference 1: note = 2'-O-methyl modified nucleotide with phosphorothioate linkage may be modified with 5'-Phosphate
  modified_base 2: mod_base = OTHER; note = 2'-fluoro modified nucleotide with phosphorothioate linkage
  modified_base 3: mod_base = OTHER; note = 2'-O-methyl modified nucleotide
  modified_base 4: mod_base = OTHER; note = 2'-fluoro modified nucleotide
  modified_base 5: mod_base = OTHER; note = 2'-O-methyl modified nucleotide
  modified_base 6: mod_base = OTHER; note = 2'-fluoro modified nucleotide
  modified_base 7: mod_base = OTHER; note = 2'-O-methyl modified nucleotide
  modified_base 8: mod_base = OTHER; note = 2'-fluoro modified nucleotide
  modified_base 9: mod_base = OTHER; note = 2'-O-methyl modified nucleotide
  modified_base 10: mod_base = OTHER; note = 2'-fluoro modified nucleotide
  modified_base 11: mod_base = OTHER; note = 2'-O-methyl modified nucleotide
  modified_base 12: mod_base = OTHER; note = 2'-fluoro modified nucleotide
  modified_base 13: mod_base = OTHER; note = 2'-O-methyl modified nucleotide
  modified_base 14: mod_base = OTHER; note = 2'-fluoro modified nucleotide with phosphorothioate linkage
  modified_base 15: mod_base = OTHER; note = 2'-O-methyl modified nucleotide with phosphorothioate linkage
  modified_base 16: mod_base = OTHER; note = 2'-fluoro modified nucleotide with phosphorothioate linkage
  modified_base 17: mod_base = OTHER; note = 2'-O-methyl modified nucleotide with phosphorothioate linkage
  modified_base 18: mod_base = OTHER; note = 2'-fluoro modified nucleotide with phosphorothioate linkage
  misc_difference 19: note = 2'-O-methyl modified nucleotide may be attached to trivalent N-Acetylgalactosamine
tcagagtgtgagaccttgt

SEQ ID NO: 849 - RNA, 19 nt, synthetic construct
  source 1..19: mol_type = other RNA
  misc_difference 1: note = 2'-O-methyl modified nucleotide with phosphorothioate linkage may be modified with 5'-Phosphate
  modified_base 2: mod_base = OTHER; note = 2'-fluoro modified nucleotide with phosphorothioate linkage
  modified_base 3: mod_base = OTHER; note = 2'-O-methyl modified nucleotide
  modified_base 4: mod_base = OTHER; note = 2'-fluoro modified nucleotide
  modified_base 5: mod_base = OTHER; note = 2'-O-methyl modified nucleotide
  modified_base 6: mod_base = OTHER; note = 2'-fluoro modified nucleotide
  modified_base 7: mod_base = OTHER; note = 2'-O-methyl modified nucleotide
  modified_base 8: mod_base = OTHER; note = 2'-fluoro modified nucleotide
  modified_base 9: mod_base = OTHER; note = 2'-O-methyl modified nucleotide
  modified_base 10: mod_base = OTHER; note = 2'-fluoro modified nucleotide
  modified_base 11: mod_base = OTHER; note = 2'-O-methyl modified nucleotide
  modified_base 12: mod_base = OTHER; note = 2'-fluoro modified nucleotide
  modified_base 13: mod_base = OTHER; note = 2'-O-methyl modified nucleotide
  modified_base 14: mod_base = OTHER; note = 2'-fluoro modified nucleotide with phosphorothioate linkage
  modified_base 15: mod_base = OTHER; note = 2'-O-methyl modified nucleotide with phosphorothioate linkage
  modified_base 16: mod_base = OTHER; note = 2'-fluoro modified nucleotide with phosphorothioate linkage
  modified_base 17: mod_base = OTHER; note = 2'-O-methyl modified nucleotide with phosphorothioate linkage
  modified_base 18: mod_base = OTHER; note = 2'-fluoro modified nucleotide with phosphorothioate linkage
  misc_difference 19: note = 2'-O-methyl modified nucleotide may be attached to trivalent N-Acetylgalactosamine
tatctctgttcattgagcc

SEQ ID NO: 850 - RNA, 19 nt, synthetic construct
  source 1..19: mol_type = other RNA
  misc_difference 1: note = 2'-O-methyl modified nucleotide with phosphorothioate linkage may be modified with 5'-Phosphate
  modified_base 2: mod_base = OTHER; note = 2'-fluoro modified nucleotide with phosphorothioate linkage
  modified_base 3: mod_base = OTHER; note = 2'-O-methyl modified nucleotide
  modified_base 4: mod_base = OTHER; note = 2'-fluoro modified nucleotide
  modified_base 5: mod_base = OTHER; note = 2'-O-methyl modified nucleotide
  modified_base 6: mod_base = OTHER; note = 2'-fluoro modified nucleotide
  modified_base 7: mod_base = OTHER; note = 2'-O-methyl modified nucleotide
  modified_base 8: mod_base = OTHER; note = 2'-fluoro modified nucleotide
  modified_base 9: mod_base = OTHER; note = 2'-O-methyl modified nucleotide
  modified_base 10: mod_base = OTHER; note = 2'-fluoro modified nucleotide
  modified_base 11: mod_base = OTHER; note = 2'-O-methyl modified nucleotide
  modified_base 12: mod_base = OTHER; note = 2'-fluoro modified nucleotide
  modified_base 13: mod_base = OTHER; note = 2'-O-methyl modified nucleotide
  modified_base 14: mod_base = OTHER; note = 2'-fluoro modified nucleotide with phosphorothioate linkage
  modified_base 15: mod_base = OTHER; note = 2'-O-methyl modified nucleotide with phosphorothioate linkage
  modified_base 16: mod_base = OTHER; note = 2'-fluoro modified nucleotide with phosphorothioate linkage
  modified_base 17: mod_base = OTHER; note = 2'-O-methyl modified nucleotide with phosphorothioate linkage
  modified_base 18: mod_base = OTHER; note = 2'-fluoro modified nucleotide with phosphorothioate linkage
  misc_difference 19: note = 2'-O-methyl modified nucleotide may be attached to trivalent N-Acetylgalactosamine
tagaagtcctgcattactg

SEQ ID NO: 851 - RNA, 15 nt, synthetic construct
  source 1..15: mol_type = other RNA
  modified_base 1: mod_base = OTHER; note = 2'-fluoro modified nucleotide with phosphorothioate linkage
  modified_base 2: mod_base = OTHER; note = 2'-O-methyl modified nucleotide with phosphorothioate linkage
  modified_base 3: mod_base = OTHER; note = 2'-fluoro modified nucleotide
  modified_base 4: mod_base = OTHER; note = 2'-O-methyl modified nucleotide
  modified_base 5: mod_base = OTHER; note = 2'-fluoro modified nucleotide
  modified_base 6: mod_base = OTHER; note = 2'-O-methyl modified nucleotide
  modified_base 7: mod_base = OTHER; note = 2'-fluoro modified nucleotide
  modified_base 8: mod_base = OTHER; note = 2'-O-methyl modified nucleotide
  modified_base 9: mod_base = OTHER; note = 2'-fluoro modified nucleotide
  modified_base 10: mod_base = OTHER; note = 2'-O-methyl modified nucleotide
  modified_base 11: mod_base = OTHER; note = 2'-fluoro modified nucleotide
  modified_base 12: mod_base = OTHER; note = 2'-O-methyl modified nucleotide
  modified_base 13: mod_base = OTHER; note = 2'-fluoro modified nucleotide with phosphorothioate linkage
  modified_base 14: mod_base = OTHER; note = 2'-O-methyl modified nucleotide with phosphorothioate linkage
  misc_difference 15: note = 2'-fluoro modified nucleotide may be attached to trivalent N-Acetylgalactosamine
gaagatccgagccta

SEQ ID NO: 852 - RNA, 15 nt, synthetic construct
  source 1..15: mol_type = other RNA
  modified_base 1: mod_base = OTHER; note = 2'-fluoro modified nucleotide with phosphorothioate linkage
  modified_base 2: mod_base = OTHER; note = 2'-O-methyl modified nucleotide with phosphorothioate linkage
  modified_base 3: mod_base = OTHER; note = 2'-fluoro modified nucleotide
  modified_base 4: mod_base = OTHER; note = 2'-O-methyl modified nucleotide
  modified_base 5: mod_base = OTHER; note = 2'-fluoro modified nucleotide
  modified_base 6: mod_base = OTHER; note = 2'-O-methyl modified nucleotide
  modified_base 7: mod_base = OTHER; note = 2'-fluoro modified nucleotide
  modified_base 8: mod_base = OTHER; note = 2'-O-methyl modified nucleotide
  modified_base 9: mod_base = OTHER; note = 2'-fluoro modified nucleotide
  modified_base 10: mod_base = OTHER; note = 2'-O-methyl modified nucleotide
  modified_base 11: mod_base = OTHER; note = 2'-fluoro modified nucleotide
  modified_base 12: mod_base = OTHER; note = 2'-O-methyl modified nucleotide
  modified_base 13: mod_base = OTHER; note = 2'-fluoro modified nucleotide with phosphorothioate linkage
  modified_base 14: mod_base = OTHER; note = 2'-O-methyl modified nucleotide with phosphorothioate linkage
  misc_difference 15: note = 2'-fluoro modified nucleotide may be attached to trivalent N-Acetylgalactosamine
caaggtcttctctca

SEQ ID NO: 853 - RNA, 15 nt, synthetic construct
  source 1..15: mol_type = other RNA
  modified_base 1: mod_base = OTHER; note = 2'-fluoro modified nucleotide with phosphorothioate linkage
  modified_base 2: mod_base = OTHER; note = 2'-O-methyl modified nucleotide with phosphorothioate linkage
  modified_base 3: mod_base = OTHER; note = 2'-fluoro modified nucleotide
  modified_base 4: mod_base = OTHER; note = 2'-O-methyl modified nucleotide
  modified_base 5: mod_base = OTHER; note = 2'-fluoro modified nucleotide
  modified_base 6: mod_base = OTHER; note = 2'-O-methyl modified nucleotide
  modified_base 7: mod_base = OTHER; note = 2'-fluoro modified nucleotide
  modified_base 8: mod_base = OTHER; note = 2'-O-methyl modified nucleotide
  modified_base 9: mod_base = OTHER; note = 2'-fluoro modified nucleotide
  modified_base 10: mod_base = OTHER; note = 2'-O-methyl modified nucleotide
  modified_base 11: mod_base = OTHER; note = 2'-fluoro modified nucleotide
  modified_base 12: mod_base = OTHER; note = 2'-O-methyl modified nucleotide
  modified_base 13: mod_base = OTHER; note = 2'-fluoro modified nucleotide with phosphorothioate linkage
  modified_base 14: mod_base = OTHER; note = 2'-O-methyl modified nucleotide with phosphorothioate linkage
  misc_difference 15: note = 2'-fluoro modified nucleotide may be attached to trivalent N-Acetylgalactosamine
aagggatctgtgtga

SEQ ID NO: 854 - RNA, 15 nt, synthetic construct
  source 1..15: mol_type = other RNA
  modified_base 1: mod_base = OTHER; note = 2'-fluoro modified nucleotide with phosphorothioate linkage
  modified_base 2: mod_base = OTHER; note = 2'-O-methyl modified nucleotide with phosphorothioate linkage
  modified_base 3: mod_base = OTHER; note = 2'-fluoro modified nucleotide
  modified_base 4: mod_base = OTHER; note = 2'-O-methyl modified nucleotide
  modified_base 5: mod_base = OTHER; note = 2'-fluoro modified nucleotide
  modified_base 6: mod_base = OTHER; note = 2'-O-methyl modified nucleotide
  modified_base 7: mod_base = OTHER; note = 2'-fluoro modified nucleotide
  modified_base 8: mod_base = OTHER; note = 2'-O-methyl modified nucleotide
  modified_base 9: mod_base = OTHER; note = 2'-fluoro modified nucleotide
  modified_base 10: mod_base = OTHER; note = 2'-O-methyl modified nucleotide
  modified_base 11: mod_base = OTHER; note = 2'-fluoro modified nucleotide
  modified_base 12: mod_base = OTHER; note = 2'-O-methyl modified nucleotide
  modified_base 13: mod_base = OTHER; note = 2'-fluoro modified nucleotide with phosphorothioate linkage
  modified_base 14: mod_base = OTHER; note = 2'-O-methyl modified nucleotide with phosphorothioate linkage
  misc_difference 15: note = 2'-fluoro modified nucleotide may be attached to trivalent N-Acetylgalactosamine
caagaccatctacaa

SEQ ID NO: 855 - RNA, 15 nt, synthetic construct
  source 1..15: mol_type = other RNA
  modified_base 1: mod_base = OTHER; note = 2'-fluoro modified nucleotide with phosphorothioate linkage
  modified_base 2: mod_base = OTHER; note = 2'-O-methyl modified nucleotide with phosphorothioate linkage
  modified_base 3: mod_base = OTHER; note = 2'-fluoro modified nucleotide
  modified_base 4: mod_base = OTHER; note = 2'-O-methyl modified nucleotide
  modified_base 5: mod_base = OTHER; note = 2'-fluoro modified nucleotide
  modified_base 6: mod_base = OTHER; note = 2'-O-methyl modified nucleotide
  modified_base 7: mod_base = OTHER; note = 2'-fluoro modified nucleotide
  modified_base 8: mod_base = OTHER; note = 2'-O-methyl modified nucleotide
  modified_base 9: mod_base = OTHER; note = 2'-fluoro modified nucleotide
  modified_base 10: mod_base = OTHER; note = 2'-O-methyl modified nucleotide
  modified_base 11: mod_base = OTHER; note = 2'-fluoro modified nucleotide
  modified_base 12: mod_base = OTHER; note = 2'-O-methyl modified nucleotide
  modified_base 13: mod_base = OTHER; note = 2'-fluoro modified nucleotide with phosphorothioate linkage
  modified_base 14: mod_base = OTHER; note = 2'-O-methyl modified nucleotide with phosphorothioate linkage
  misc_difference 15: note = 2'-fluoro modified nucleotide may be attached to trivalent N-Acetylgalactosamine
aaggtcttctctcta

SEQ ID NO: 856 - RNA, 15 nt, synthetic construct
  source 1..15: mol_type = other RNA
  modified_base 1: mod_base = OTHER; note = 2'-fluoro modified nucleotide with phosphorothioate linkage
  modified_base 2: mod_base = OTHER; note = 2'-O-methyl modified nucleotide with phosphorothioate linkage
  modified_base 3: mod_base = OTHER; note = 2'-fluoro modified nucleotide
  modified_base 4: mod_base = OTHER; note = 2'-O-methyl modified nucleotide
  modified_base 5: mod_base = OTHER; note = 2'-fluoro modified nucleotide
  modified_base 6: mod_base = OTHER; note = 2'-O-methyl modified nucleotide
  modified_base 7: mod_base = OTHER; note = 2'-fluoro modified nucleotide
  modified_base 8: mod_base = OTHER; note = 2'-O-methyl modified nucleotide
  modified_base 9: mod_base = OTHER; note = 2'-fluoro modified nucleotide
  modified_base 10: mod_base = OTHER; note = 2'-O-methyl modified nucleotide
  modified_base 11: mod_base = OTHER; note = 2'-fluoro modified nucleotide
  modified_base 12: mod_base = OTHER; note = 2'-O-methyl modified nucleotide
  modified_base 13: mod_base = OTHER; note = 2'-fluoro modified nucleotide with phosphorothioate linkage
  modified_base 14: mod_base = OTHER; note = 2'-O-methyl modified nucleotide with phosphorothioate linkage
  misc_difference 15: note = 2'-fluoro modified nucleotide may be attached to trivalent N-Acetylgalactosamine
aaagggatctgtgta

SEQ ID NO: 857 - RNA, 15 nt, synthetic construct
  source 1..15: mol_type = other RNA
  modified_base 1: mod_base = OTHER; note = 2'-fluoro modified nucleotide with phosphorothioate linkage
  modified_base 2: mod_base = OTHER; note = 2'-O-methyl modified nucleotide with phosphorothioate linkage
  modified_base 3: mod_base = OTHER; note = 2'-fluoro modified nucleotide
  modified_base 4: mod_base = OTHER; note = 2'-O-methyl modified nucleotide
  modified_base 5: mod_base = OTHER; note = 2'-fluoro modified nucleotide
  modified_base 6: mod_base = OTHER; note = 2'-O-methyl modified nucleotide
  modified_base 7: mod_base = OTHER; note = 2'-fluoro modified nucleotide
  modified_base 8: mod_base = OTHER; note = 2'-O-methyl modified nucleotide
  modified_base 9: mod_base = OTHER; note = 2'-fluoro modified nucleotide
  modified_base 10: mod_base = OTHER; note = 2'-O-methyl modified nucleotide
  modified_base 11: mod_base = OTHER; note = 2'-fluoro modified nucleotide
  modified_base 12: mod_base = OTHER; note = 2'-O-methyl modified nucleotide
  modified_base 13: mod_base = OTHER; note = 2'-fluoro modified nucleotide with phosphorothioate linkage
  modified_base 14: mod_base = OTHER; note = 2'-O-methyl modified nucleotide with phosphorothioate linkage
  misc_difference 15: note = 2'-fluoro modified nucleotide may be attached to trivalent N-Acetylgalactosamine
cctcatggtgttcga

SEQ ID NO: 858 - RNA, 15 nt, synthetic construct
  source 1..15: mol_type = other RNA
  modified_base 1: mod_base = OTHER; note = 2'-fluoro modified nucleotide with phosphorothioate linkage
  modified_base 2: mod_base = OTHER; note = 2'-O-methyl modified nucleotide with phosphorothioate linkage
  modified_base 3: mod_base = OTHER; note = 2'-fluoro modified nucleotide
  modified_base 4: mod_base = OTHER; note = 2'-O-methyl modified nucleotide
  modified_base 5: mod_base = OTHER; note = 2'-fluoro modified nucleotide
  modified_base 6: mod_base = OTHER; note = 2'-O-methyl modified nucleotide
  modified_base 7: mod_base = OTHER; note = 2'-fluoro modified nucleotide
  modified_base 8: mod_base = OTHER; note = 2'-O-methyl modified nucleotide
  modified_base 9: mod_base = OTHER; note = 2'-fluoro modified nucleotide
  modified_base 10: mod_base = OTHER; note = 2'-O-methyl modified nucleotide
  modified_base 11: mod_base = OTHER; note = 2'-fluoro modified nucleotide
  modified_base 12: mod_base = OTHER; note = 2'-O-methyl modified nucleotide
  modified_base 13: mod_base = OTHER; note = 2'-fluoro modified nucleotide with phosphorothioate linkage
  modified_base 14: mod_base = OTHER; note = 2'-O-methyl modified nucleotide with phosphorothioate linkage
  misc_difference 15: note = 2'-fluoro modified nucleotide may be attached to trivalent N-Acetylgalactosamine
tttgacctcatggta

SEQ ID NO: 859 - RNA, 15 nt, synthetic construct
  source 1..15: mol_type = other RNA
  modified_base 1: mod_base = OTHER; note = 2'-fluoro modified nucleotide with phosphorothioate linkage
  modified_base 2: mod_base = OTHER; note = 2'-O-methyl modified nucleotide with phosphorothioate linkage
  modified_base 3: mod_base = OTHER; note = 2'-fluoro modified nucleotide
  modified_base 4: mod_base = OTHER; note = 2'-O-methyl modified nucleotide
  modified_base 5: mod_base = OTHER; note = 2'-fluoro modified nucleotide
  modified_base 6: mod_base = OTHER; note = 2'-O-methyl modified nucleotide
  modified_base 7: mod_base = OTHER; note = 2'-fluoro modified nucleotide
  modified_base 8: mod_base = OTHER; note = 2'-O-methyl modified nucleotide
  modified_base 9: mod_base = OTHER; note = 2'-fluoro modified nucleotide
  modified_base 10: mod_base = OTHER; note = 2'-O-methyl modified nucleotide
  modified_base 11: mod_base = OTHER; note = 2'-fluoro modified nucleotide
  modified_base 12: mod_base = OTHER; note = 2'-O-methyl modified nucleotide
  modified_base 13: mod_base = OTHER; note = 2'-fluoro modified nucleotide with phosphorothioate linkage
  modified_base 14: mod_base = OTHER; note = 2'-O-methyl modified nucleotide with phosphorothioate linkage
  misc_difference 15: note = 2'-fluoro modified nucleotide may be attached to trivalent N-Acetylgalactosamine
cgtggtcaaggtcta

SEQ ID NO: 860 - RNA, 15 nt, synthetic construct
  source 1..15: mol_type = other RNA
  modified_base 1: mod_base = OTHER; note = 2'-fluoro modified nucleotide with phosphorothioate linkage
  modified_base 2: mod_base = OTHER; note = 2'-O-methyl modified nucleotide with phosphorothioate linkage
  modified_base 3: mod_base = OTHER; note = 2'-fluoro modified nucleotide
  modified_base 4: mod_base = OTHER; note = 2'-O-methyl modified nucleotide
  modified_base 5: mod_base = OTHER; note = 2'-fluoro modified nucleotide
  modified_base 6: mod_base = OTHER; note = 2'-O-methyl modified nucleotide
  modified_base 7: mod_base = OTHER; note = 2'-fluoro modified nucleotide
  modified_base 8: mod_base = OTHER; note = 2'-O-methyl modified nucleotide
  modified_base 9: mod_base = OTHER; note = 2'-fluoro modified nucleotide
  modified_base 10: mod_base = OTHER; note = 2'-O-methyl modified nucleotide
  modified_base 11: mod_base = OTHER; note = 2'-fluoro modified nucleotide
  modified_base 12: mod_base = OTHER; note = 2'-O-methyl modified nucleotide
  modified_base 13: mod_base = OTHER; note = 2'-fluoro modified nucleotide with phosphorothioate linkage
  modified_base 14: mod_base = OTHER; note = 2'-O-methyl modified nucleotide with phosphorothioate linkage
  misc_difference 15: note = 2'-fluoro modified nucleotide may be attached to trivalent N-Acetylgalactosamine
ttgacctcatggtga

SEQ ID NO: 861 - RNA, 15 nt, synthetic construct
  source 1..15: mol_type = other RNA
  modified_base 1: mod_base = OTHER; note = 2'-fluoro modified nucleotide with phosphorothioate linkage
  modified_base 2: mod_base = OTHER; note = 2'-O-methyl modified nucleotide with phosphorothioate linkage
  modified_base 3: mod_base = OTHER; note = 2'-fluoro modified nucleotide
  modified_base 4: mod_base = OTHER; note = 2'-O-methyl modified nucleotide
  modified_base 5: mod_base = OTHER; note = 2'-fluoro modified nucleotide
  modified_base 6: mod_base = OTHER; note = 2'-O-methyl modified nucleotide
  modified_base 7: mod_base = OTHER; note = 2'-fluoro modified nucleotide
  modified_base 8: mod_base = OTHER; note = 2'-O-methyl modified nucleotide
  modified_base 9: mod_base = OTHER; note = 2'-fluoro modified nucleotide
  modified_base 10: mod_base = OTHER; note = 2'-O-methyl modified nucleotide
  modified_base 11: mod_base = OTHER; note = 2'-fluoro modified nucleotide
  modified_base 12: mod_base = OTHER; note = 2'-O-methyl modified nucleotide
  modified_base 13: mod_base = OTHER; note = 2'-fluoro modified nucleotide with phosphorothioate linkage
  modified_base 14: mod_base = OTHER; note = 2'-O-methyl modified nucleotide with phosphorothioate linkage
  misc_difference 15: note = 2'-fluoro modified nucleotide may be attached to trivalent N-Acetylgalactosamine
gacctcatggtgtta

SEQ ID NO: 862 - RNA, 15 nt, synthetic construct
  source 1..15: mol_type = other RNA
  modified_base 1: mod_base = OTHER; note = 2'-fluoro modified nucleotide with phosphorothioate linkage
  modified_base 2: mod_base = OTHER; note = 2'-O-methyl modified nucleotide with phosphorothioate linkage
  modified_base 3: mod_base = OTHER; note = 2'-fluoro modified nucleotide
  modified_base 4: mod_base = OTHER; note = 2'-O-methyl modified nucleotide
  modified_base 5: mod_base = OTHER; note = 2'-fluoro modified nucleotide
  modified_base 6: mod_base = OTHER; note = 2'-O-methyl modified nucleotide
  modified_base 7: mod_base = OTHER; note = 2'-fluoro modified nucleotide
  modified_base 8: mod_base = OTHER; note = 2'-O-methyl modified nucleotide
  modified_base 9: mod_base = OTHER; note = 2'-fluoro modified nucleotide
  modified_base 10: mod_base = OTHER; note = 2'-O-methyl modified nucleotide
  modified_base 11: mod_base = OTHER; note = 2'-fluoro modified nucleotide
  modified_base 12: mod_base = OTHER; note = 2'-O-methyl modified nucleotide
  modified_base 13: mod_base = OTHER; note = 2'-fluoro modified nucleotide with phosphorothioate linkage
  modified_base 14: mod_base = OTHER; note = 2'-O-methyl modified nucleotide with phosphorothioate linkage
  misc_difference 15: note = 2'-fluoro modified nucleotide may be attached to trivalent N-Acetylgalactosamine
gtggtcaaggtctta

SEQ ID NO: 863 - RNA, 15 nt, synthetic construct
  source 1..15: mol_type = other RNA
  modified_base 1: mod_base = OTHER; note = 2'-fluoro modified nucleotide with phosphorothioate linkage
  modified_base 2: mod_base = OTHER; note = 2'-O-methyl modified nucleotide with phosphorothioate linkage
  modified_base 3: mod_base = OTHER; note = 2'-fluoro modified nucleotide
  modified_base 4: mod_base = OTHER; note = 2'-O-methyl modified nucleotide
  modified_base 5: mod_base = OTHER; note = 2'-fluoro modified nucleotide
  modified_base 6: mod_base = OTHER; note = 2'-O-methyl modified nucleotide
  modified_base 7: mod_base = OTHER; note = 2'-fluoro modified nucleotide
  modified_base 8: mod_base = OTHER; note = 2'-O-methyl modified nucleotide
  modified_base 9: mod_base = OTHER; note = 2'-fluoro modified nucleotide
  modified_base 10: mod_base = OTHER; note = 2'-O-methyl modified nucleotide
  modified_base 11: mod_base = OTHER; note = 2'-fluoro modified nucleotide
  modified_base 12: mod_base = OTHER; note = 2'-O-methyl modified nucleotide
  modified_base 13: mod_base = OTHER; note = 2'-fluoro modified nucleotide with phosphorothioate linkage
  modified_base 14: mod_base = OTHER; note = 2'-O-methyl modified nucleotide with phosphorothioate linkage
  misc_difference 15: note = 2'-fluoro modified nucleotide may be attached to trivalent N-Acetylgalactosamine
ggtcaaggtcttcta

SEQ ID NO: 864 - RNA, 15 nt, synthetic construct
  source 1..15: mol_type = other RNA
  modified_base 1: mod_base = OTHER; note = 2'-fluoro modified nucleotide with phosphorothioate linkage
  modified_base 2: mod_base = OTHER; note = 2'-O-methyl modified nucleotide with phosphorothioate linkage
  modified_base 3: mod_base = OTHER; note = 2'-fluoro modified nucleotide
  modified_base 4: mod_base = OTHER; note = 2'-O-methyl modified nucleotide
  modified_base 5: mod_base = OTHER; note = 2'-fluoro modified nucleotide
  modified_base 6: mod_base = OTHER; note = 2'-O-methyl modified nucleotide
  modified_base 7: mod_base = OTHER; note = 2'-fluoro modified nucleotide
  modified_base 8: mod_base = OTHER; note = 2'-O-methyl modified nucleotide
  modified_base 9: mod_base = OTHER; note = 2'-fluoro modified nucleotide
  modified_base 10: mod_base = OTHER; note = 2'-O-methyl modified nucleotide
  modified_base 11: mod_base = OTHER; note = 2'-fluoro modified nucleotide
  modified_base 12: mod_base = OTHER; note = 2'-O-methyl modified nucleotide
  modified_base 13: mod_base = OTHER; note = 2'-fluoro modified nucleotide with phosphorothioate linkage
  modified_base 14: mod_base = OTHER; note = 2'-O-methyl modified nucleotide with phosphorothioate linkage
  misc_difference 15: note = 2'-fluoro modified nucleotide may be attached to trivalent N-Acetylgalactosamine
atgtgtacaagacca

SEQ ID NO: 865 - RNA, 15 nt, synthetic construct
  source 1..15: mol_type = other RNA
  modified_base 1: mod_base = OTHER; note = 2'-fluoro modified nucleotide with phosphorothioate linkage
  modified_base 2: mod_base = OTHER; note = 2'-O-methyl modified nucleotide with phosphorothioate linkage
  modified_base 3: mod_base = OTHER; note = 2'-fluoro modified nucleotide
  modified_base 4: mod_base = OTHER; note = 2'-O-methyl modified nucleotide
  modified_base 5: mod_base = OTHER; note = 2'-fluoro modified nucleotide
  modified_base 6: mod_base = OTHER; note = 2'-O-methyl modified nucleotide
  modified_base 7: mod_base = OTHER; note = 2'-fluoro modified nucleotide
  modified_base 8: mod_base = OTHER; note = 2'-O-methyl modified nucleotide
  modified_base 9: mod_base = OTHER; note = 2'-fluoro modified nucleotide
  modified_base 10: mod_base = OTHER; note = 2'-O-methyl modified nucleotide
  modified_base 11: mod_base = OTHER; note = 2'-fluoro modified nucleotide
  modified_base 12: mod_base = OTHER; note = 2'-O-methyl modified nucleotide
  modified_base 13: mod_base = OTHER; note = 2'-fluoro modified nucleotide with phosphorothioate linkage
  modified_base 14: mod_base = OTHER; note = 2'-O-methyl modified nucleotide with phosphorothioate linkage
  misc_difference 15: note = 2'-fluoro modified nucleotide may be attached to trivalent N-Acetylgalactosamine
ctttgacctcatgga

SEQ ID NO: 866 - RNA, 15 nt, synthetic construct
  source 1..15: mol_type = other RNA
  modified_base 1: mod_base = OTHER; note = 2'-fluoro modified nucleotide with phosphorothioate linkage
  modified_base 2: mod_base = OTHER; note = 2'-O-methyl modified nucleotide with phosphorothioate linkage
  modified_base 3: mod_base = OTHER; note = 2'-fluoro modified nucleotide
  modified_base 4: mod_base = OTHER; note = 2'-O-methyl modified nucleotide
  modified_base 5: mod_base = OTHER; note = 2'-fluoro modified nucleotide
  modified_base 6: mod_base = OTHER; note = 2'-O-methyl modified nucleotide
  modified_base 7: mod_base = OTHER; note = 2'-fluoro modified nucleotide
  modified_base 8: mod_base = OTHER; note = 2'-O-methyl modified nucleotide
  modified_base 9: mod_base = OTHER; note = 2'-fluoro modified nucleotide
  modified_base 10: mod_base = OTHER; note = 2'-O-methyl modified nucleotide
  modified_base 11: mod_base = OTHER; note = 2'-fluoro modified nucleotide
  modified_base 12: mod_base = OTHER; note = 2'-O-methyl modified nucleotide
  modified_base 13: mod_base = OTHER; note = 2'-fluoro modified nucleotide with phosphorothioate linkage
  modified_base 14: mod_base = OTHER; note = 2'-O-methyl modified nucleotide with phosphorothioate linkage
  misc_difference 15: note = 2'-fluoro modified nucleotide may be attached to trivalent N-Acetylgalactosamine
cctttgacctcatga

SEQ ID NO: 867 - RNA, 15 nt, synthetic construct
  source 1..15: mol_type = other RNA
  modified_base 1: mod_base = OTHER; note = 2'-fluoro modified nucleotide with phosphorothioate linkage
  modified_base 2: mod_base = OTHER; note = 2'-O-methyl modified nucleotide with phosphorothioate linkage
  modified_base 3: mod_base = OTHER; note = 2'-fluoro modified nucleotide
  modified_base 4: mod_base = OTHER; note = 2'-O-methyl modified nucleotide
  modified_base 5: mod_base = OTHER; note = 2'-fluoro modified nucleotide
  modified_base 6: mod_base = OTHER; note = 2'-O-methyl modified nucleotide
  modified_base 7: mod_base = OTHER; note = 2'-fluoro modified nucleotide
  modified_base 8: mod_base = OTHER; note = 2'-O-methyl modified nucleotide
  modified_base 9: mod_base = OTHER; note = 2'-fluoro modified nucleotide
  modified_base 10: mod_base = OTHER; note = 2'-O-methyl modified nucleotide
  modified_base 11: mod_base = OTHER; note = 2'-fluoro modified nucleotide
  modified_base 12: mod_base = OTHER; note = 2'-O-methyl modified nucleotide
  modified_base 13: mod_base = OTHER; note = 2'-fluoro modified nucleotide with phosphorothioate linkage
  modified_base 14: mod_base = OTHER; note = 2'-O-methyl modified nucleotide with phosphorothioate linkage
  misc_difference 15: note = 2'-fluoro modified nucleotide may be attached to trivalent N-Acetylgalactosamine
gaccagaattctcca

SEQ ID NO: 868 - RNA, 15 nt, synthetic construct
  source 1..15: mol_type = other RNA
  modified_base 1: mod_base = OTHER; note = 2'-fluoro modified nucleotide with phosphorothioate linkage
  modified_base 2: mod_base = OTHER; note = 2'-O-methyl modified nucleotide with phosphorothioate linkage
  modified_base 3: mod_base = OTHER; note = 2'-fluoro modified nucleotide
  modified_base 4: mod_base = OTHER; note = 2'-O-methyl modified nucleotide
  modified_base 5: mod_base = OTHER; note = 2'-fluoro modified nucleotide
  modified_base 6: mod_base = OTHER; note = 2'-O-methyl modified nucleotide
  modified_base 7: mod_base = OTHER; note = 2'-fluoro modified nucleotide
  modified_base 8: mod_base = OTHER; note = 2'-O-methyl modified nucleotide
  modified_base 9: mod_base = OTHER; note = 2'-fluoro modified nucleotide
  modified_base 10: mod_base = OTHER; note = 2'-O-methyl modified nucleotide
  modified_base 11: mod_base = OTHER; note = 2'-fluoro modified nucleotide
  modified_base 12: mod_base = OTHER; note = 2'-O-methyl modified nucleotide
  modified_base 13: mod_base = OTHER; note = 2'-fluoro modified nucleotide with phosphorothioate linkage
  modified_base 14: mod_base = OTHER; note = 2'-O-methyl modified nucleotide with phosphorothioate linkage
  misc_difference 15: note = 2'-fluoro modified nucleotide may be attached to trivalent N-Acetylgalactosamine
cttggctcaatacca

SEQ ID NO: 869 - RNA, 15 nt, synthetic construct
  source 1..15: mol_type = other RNA
  modified_base 1: mod_base = OTHER; note = 2'-fluoro modified nucleotide with phosphorothioate linkage
  modified_base 2: mod_base = OTHER; note = 2'-O-methyl modified nucleotide with phosphorothioate linkage
  modified_base 3: mod_base = OTHER; note = 2'-fluoro modified nucleotide
  modified_base 4: mod_base = OTHER; note = 2'-O-methyl modified nucleotide
  modified_base 5: mod_base = OTHER; note = 2'-fluoro modified nucleotide
  modified_base 6: mod_base = OTHER; note = 2'-O-methyl modified nucleotide
  modified_base 7: mod_base = OTHER; note = 2'-fluoro modified nucleotide
  modified_base 8: mod_base = OTHER; note = 2'-O-methyl modified nucleotide
  modified_base 9: mod_base = OTHER; note = 2'-fluoro modified nucleotide
  modified_base 10: mod_base = OTHER; note = 2'-O-methyl modified nucleotide
  modified_base 11: mod_base = OTHER; note = 2'-fluoro modified nucleotide
  modified_base 12: mod_base = OTHER; note = 2'-O-methyl modified nucleotide
  modified_base 13: mod_base = OTHER; note = 2'-fluoro modified nucleotide with phosphorothioate linkage
  modified_base 14: mod_base = OTHER; note = 2'-O-methyl modified nucleotide with phosphorothioate linkage
  misc_difference 15: note = 2'-fluoro modified nucleotide may be attached to trivalent N-Acetylgalactosamine
cttctctctggctga

SEQ ID NO: 870 - RNA, 15 nt, synthetic construct
  source 1..15: mol_type = other RNA
  modified_base 1: mod_base = OTHER; note = 2'-fluoro modified nucleotide with phosphorothioate linkage
  modified_base 2: mod_base = OTHER; note = 2'-O-methyl modified nucleotide with phosphorothioate linkage
  modified_base 3: mod_base = OTHER; note = 2'-fluoro modified nucleotide
  modified_base 4: mod_base = OTHER; note = 2'-O-methyl modified nucleotide
  modified_base 5: mod_base = OTHER; note = 2'-fluoro modified nucleotide
  modified_base 6: mod_base = OTHER; note = 2'-O-methyl modified nucleotide
  modified_base 7: mod_base = OTHER; note = 2'-fluoro modified nucleotide
  modified_base 8: mod_base = OTHER; note = 2'-O-methyl modified nucleotide
  modified_base 9: mod_base = OTHER; note = 2'-fluoro modified nucleotide
  modified_base 10: mod_base = OTHER; note = 2'-O-methyl modified nucleotide
  modified_base 11: mod_base = OTHER; note = 2'-fluoro modified nucleotide
  modified_base 12: mod_base = OTHER; note = 2'-O-methyl modified nucleotide
  modified_base 13: mod_base = OTHER; note = 2'-fluoro modified nucleotide with phosphorothioate linkage
  modified_base 14: mod_base = OTHER; note = 2'-O-methyl modified nucleotide with phosphorothioate linkage
  misc_difference 15: note = 2'-fluoro modified nucleotide may be attached to trivalent N-Acetylgalactosamine
tgctgcccagtttca

SEQ ID NO: 871 - RNA, 15 nt, synthetic construct
  source 1..15: mol_type = other RNA
  modified_base 1: mod_base = OTHER; note = 2'-fluoro modified nucleotide with phosphorothioate linkage
  modified_base 2: mod_base = OTHER; note = 2'-O-methyl modified nucleotide with phosphorothioate linkage
  modified_base 3: mod_base = OTHER; note = 2'-fluoro modified nucleotide
  modified_base 4: mod_base = OTHER; note = 2'-O-methyl modified nucleotide
  modified_base 5: mod_base = OTHER; note = 2'-fluoro modified nucleotide
  modified_base 6: mod_base = OTHER; note = 2'-O-methyl modified nucleotide
  modified_base 7: mod_base = OTHER; note = 2'-fluoro modified nucleotide
  modified_base 8: mod_base = OTHER; note = 2'-O-methyl modified nucleotide
  modified_base 9: mod_base = OTHER; note = 2'-fluoro modified nucleotide
  modified_base 10: mod_base = OTHER; note = 2'-O-methyl modified nucleotide
  modified_base 11: mod_base = OTHER; note = 2'-fluoro modified nucleotide
  modified_base 12: mod_base = OTHER; note = 2'-O-methyl modified nucleotide
  modified_base 13: mod_base = OTHER; note = 2'-fluoro modified nucleotide with phosphorothioate linkage
  modified_base 14: mod_base = OTHER; note = 2'-O-methyl modified nucleotide with phosphorothioate linkage
  misc_difference 15: note = 2'-fluoro modified nucleotide may be attached to trivalent N-Acetylgalactosamine
gcctacagagaaata

SEQ ID NO: 872 - RNA, 15 nt, synthetic construct
  source 1..15: mol_type = other RNA
  modified_base 1: mod_base = OTHER; note = 2'-fluoro modified nucleotide with phosphorothioate linkage
  modified_base 2: mod_base = OTHER; note = 2'-O-methyl modified nucleotide with phosphorothioate linkage
  modified_base 3: mod_base = OTHER; note = 2'-fluoro modified nucleotide
  modified_base 4: mod_base = OTHER; note = 2'-O-methyl modified nucleotide
  modified_base 5: mod_base = OTHER; note = 2'-fluoro modified nucleotide
  modified_base 6: mod_base = OTHER; note = 2'-O-methyl modified nucleotide
  modified_base 7: mod_base = OTHER; note = 2'-fluoro modified nucleotide
  modified_base 8: mod_base = OTHER; note = 2'-O-methyl modified nucleotide
  modified_base 9: mod_base = OTHER; note = 2'-fluoro modified nucleotide
  modified_base 10: mod_base = OTHER; note = 2'-O-methyl modified nucleotide
  modified_base 11: mod_base = OTHER; note = 2'-fluoro modified nucleotide
  modified_base 12: mod_base = OTHER; note = 2'-O-methyl modified nucleotide
  modified_base 13: mod_base = OTHER; note = 2'-fluoro modified nucleotide with phosphorothioate linkage
  modified_base 14: mod_base = OTHER; note = 2'-O-methyl modified nucleotide with phosphorothioate linkage
  misc_difference 15: note = 2'-fluoro modified nucleotide may be attached to trivalent N-Acetylgalactosamine
aaaaggccaaggcaa

SEQ ID NO: 873 - RNA, 15 nt, synthetic construct
  source 1..15: mol_type = other RNA
  modified_base 1: mod_base = OTHER; note = 2'-fluoro modified nucleotide with phosphorothioate linkage
  modified_base 2: mod_base = OTHER; note = 2'-O-methyl modified nucleotide with phosphorothioate linkage
  modified_base 3: mod_base = OTHER; note = 2'-fluoro modified nucleotide
  modified_base 4: mod_base = OTHER; note = 2'-O-methyl modified nucleotide
  modified_base 5: mod_base = OTHER; note = 2'-fluoro modified nucleotide
  modified_base 6: mod_base = OTHER; note = 2'-O-methyl modified nucleotide
  modified_base 7: mod_base = OTHER; note = 2'-fluoro modified nucleotide
  modified_base 8: mod_base = OTHER; note = 2'-O-methyl modified nucleotide
  modified_base 9: mod_base = OTHER; note = 2'-fluoro modified nucleotide
  modified_base 10: mod_base = OTHER; note = 2'-O-methyl modified nucleotide
  modified_base 11: mod_base = OTHER; note = 2'-fluoro modified nucleotide
  modified_base 12: mod_base = OTHER; note = 2'-O-methyl modified nucleotide
  modified_base 13: mod_base = OTHER; note = 2'-fluoro modified nucleotide with phosphorothioate linkage
  modified_base 14: mod_base = OTHER; note = 2'-O-methyl modified nucleotide with phosphorothioate linkage
  misc_difference 15: note = 2'-fluoro modified nucleotide may be attached to trivalent N-Acetylgalactosamine
aggtcttctctctga

SEQ ID NO: 874 - RNA, 15 nt, synthetic construct
  source 1..15: mol_type = other RNA
  modified_base 1: mod_base = OTHER; note = 2'-fluoro modified nucleotide with phosphorothioate linkage
  modified_base 2: mod_base = OTHER; note = 2'-O-methyl modified nucleotide with phosphorothioate linkage
  modified_base 3: mod_base = OTHER; note = 2'-fluoro modified nucleotide
  modified_base 4: mod_base = OTHER; note = 2'-O-methyl modified nucleotide
  modified_base 5: mod_base = OTHER; note = 2'-fluoro modified nucleotide
  modified_base 6: mod_base = OTHER; note = 2'-O-methyl modified nucleotide
  modified_base 7: mod_base = OTHER; note = 2'-fluoro modified nucleotide
  modified_base 8: mod_base = OTHER; note = 2'-O-methyl modified nucleotide
  modified_base 9: mod_base = OTHER; note = 2'-fluoro modified nucleotide
  modified_base 10: mod_base = OTHER; note = 2'-O-methyl modified nucleotide
  modified_base 11: mod_base = OTHER; note = 2'-fluoro modified nucleotide
  modified_base 12: mod_base = OTHER; note = 2'-O-methyl modified nucleotide
  modified_base 13: mod_base = OTHER; note = 2'-fluoro modified nucleotide with phosphorothioate linkage
  modified_base 14: mod_base = OTHER; note = 2'-O-methyl modified nucleotide with phosphorothioate linkage
  misc_difference 15: note = 2'-fluoro modified nucleotide may be attached to trivalent N-Acetylgalactosamine
cctacagagaaatta

SEQ ID NO: 875 - RNA, 15 nt, synthetic construct
  source 1..15: mol_type = other RNA
  modified_base 1: mod_base = OTHER; note = 2'-fluoro modified nucleotide with phosphorothioate linkage
  modified_base 2: mod_base = OTHER; note = 2'-O-methyl modified nucleotide with phosphorothioate linkage
  modified_base 3: mod_base = OTHER; note = 2'-fluoro modified nucleotide
  modified_base 4: mod_base = OTHER; note = 2'-O-methyl modified nucleotide
  modified_base 5: mod_base = OTHER; note = 2'-fluoro modified nucleotide
  modified_base 6: mod_base = OTHER; note = 2'-O-methyl modified nucleotide
  modified_base 7: mod_base = OTHER; note = 2'-fluoro modified nucleotide
  modified_base 8: mod_base = OTHER; note = 2'-O-methyl modified nucleotide
  modified_base 9: mod_base = OTHER; note = 2'-fluoro modified nucleotide
  modified_base 10: mod_base = OTHER; note = 2'-O-methyl modified nucleotide
  modified_base 11: mod_base = OTHER; note = 2'-fluoro modified nucleotide
  modified_base 12: mod_base = OTHER; note = 2'-O-methyl modified nucleotide
  modified_base 13: mod_base = OTHER; note = 2'-fluoro modified nucleotide with phosphorothioate linkage
  modified_base 14: mod_base = OTHER; note = 2'-O-methyl modified nucleotide with phosphorothioate linkage
  misc_difference 15: note = 2'-fluoro modified nucleotide may be attached to trivalent N-Acetylgalactosamine
agcctacagagaaaa

SEQ ID NO: 876 - RNA, 15 nt, synthetic construct
  source 1..15: mol_type = other RNA
  modified_base 1: mod_base = OTHER; note = 2'-fluoro modified nucleotide with phosphorothioate linkage
  modified_base 2: mod_base = OTHER; note = 2'-O-methyl modified nucleotide with phosphorothioate linkage
  modified_base 3: mod_base = OTHER; note = 2'-fluoro modified nucleotide
  modified_base 4: mod_base = OTHER; note = 2'-O-methyl modified nucleotide
  modified_base 5: mod_base = OTHER; note = 2'-fluoro modified nucleotide
  modified_base 6: mod_base = OTHER; note = 2'-O-methyl modified nucleotide
  modified_base 7: mod_base = OTHER; note = 2'-fluoro modified nucleotide
  modified_base 8: mod_base = OTHER; note = 2'-O-methyl modified nucleotide
  modified_base 9: mod_base = OTHER; note = 2'-fluoro modified nucleotide
  modified_base 10: mod_base = OTHER; note = 2'-O-methyl modified nucleotide
  modified_base 11: mod_base = OTHER; note = 2'-fluoro modified nucleotide
  modified_base 12: mod_base = OTHER; note = 2'-O-methyl modified nucleotide
  modified_base 13: mod_base = OTHER; note = 2'-fluoro modified nucleotide with phosphorothioate linkage
  modified_base 14: mod_base = OTHER; note = 2'-O-methyl modified nucleotide with phosphorothioate linkage
  misc_difference 15: note = 2'-fluoro modified nucleotide may be attached to trivalent N-Acetylgalactosamine
tggagcactggccca

SEQ ID NO: 877 - RNA, 15 nt, synthetic construct
  source 1..15: mol_type = other RNA
  modified_base 1: mod_base = OTHER; note = 2'-fluoro modified nucleotide with phosphorothioate linkage
  modified_base 2: mod_base = OTHER; note = 2'-O-methyl modified nucleotide with phosphorothioate linkage
  modified_base 3: mod_base = OTHER; note = 2'-fluoro modified nucleotide
  modified_base 4: mod_base = OTHER; note = 2'-O-methyl modified nucleotide
  modified_base 5: mod_base = OTHER; note = 2'-fluoro modified nucleotide
  modified_base 6: mod_base = OTHER; note = 2'-O-methyl modified nucleotide
  modified_base 7: mod_base = OTHER; note = 2'-fluoro modified nucleotide
  modified_base 8: mod_base = OTHER; note = 2'-O-methyl modified nucleotide
  modified_base 9: mod_base = OTHER; note = 2'-fluoro modified nucleotide
  modified_base 10: mod_base = OTHER; note = 2'-O-methyl modified nucleotide
  modified_base 11: mod_base = OTHER; note = 2'-fluoro modified nucleotide
  modified_base 12: mod_base = OTHER; note = 2'-O-methyl modified nucleotide
  modified_base 13: mod_base = OTHER; note = 2'-fluoro modified nucleotide with phosphorothioate linkage
  modified_base 14: mod_base = OTHER; note = 2'-O-methyl modified nucleotide with phosphorothioate linkage
  misc_difference 15: note = 2'-fluoro modified nucleotide may be attached to trivalent N-Acetylgalactosamine
gatgccactatgtca

SEQ ID NO: 878 - RNA, 15 nt, synthetic construct
  source 1..15: mol_type = other RNA
  modified_base 1: mod_base = OTHER; note = 2'-fluoro modified nucleotide with phosphorothioate linkage
  modified_base 2: mod_base = OTHER; note = 2'-O-methyl modified nucleotide with phosphorothioate linkage
  modified_base 3: mod_base = OTHER; note = 2'-fluoro modified nucleotide
  modified_base 4: mod_base = OTHER; note = 2'-O-methyl modified nucleotide
  modified_base 5: mod_base = OTHER; note = 2'-fluoro modified nucleotide
  modified_base 6: mod_base = OTHER; note = 2'-O-methyl modified nucleotide
  modified_base 7: mod_base = OTHER; note = 2'-fluoro modified nucleotide
  modified_base 8: mod_base = OTHER; note = 2'-O-methyl modified nucleotide
  modified_base 9: mod_base = OTHER; note = 2'-fluoro modified nucleotide
  modified_base 10: mod_base = OTHER; note = 2'-O-methyl modified nucleotide
  modified_base 11: mod_base = OTHER; note = 2'-fluoro modified nucleotide
  modified_base 12: mod_base = OTHER; note = 2'-O-methyl modified nucleotide
  modified_base 13: mod_base = OTHER; note = 2'-fluoro modified nucleotide with phosphorothioate linkage
  modified_base 14: mod_base = OTHER; note = 2'-O-methyl modified nucleotide with phosphorothioate linkage
  misc_difference 15: note = 2'-fluoro modified nucleotide may be attached to trivalent N-Acetylgalactosamine
aaggaatcagaatga

SEQ ID NO: 879 - RNA, 15 nt, synthetic construct
  source 1..15: mol_type = other RNA
  modified_base 1: mod_base = OTHER; note = 2'-fluoro modified nucleotide with phosphorothioate linkage
  modified_base 2: mod_base = OTHER; note = 2'-O-methyl modified nucleotide with phosphorothioate linkage
  modified_base 3: mod_base = OTHER; note = 2'-fluoro modified nucleotide
  modified_base 4: mod_base = OTHER; note = 2'-O-methyl modified nucleotide
  modified_base 5: mod_base = OTHER; note = 2'-fluoro modified nucleotide
  modified_base 6: mod_base = OTHER; note = 2'-O-methyl modified nucleotide
  modified_base 7: mod_base = OTHER; note = 2'-fluoro modified nucleotide
  modified_base 8: mod_base = OTHER; note = 2'-O-methyl modified nucleotide
  modified_base 9: mod_base = OTHER; note = 2'-fluoro modified nucleotide
  modified_base 10: mod_base = OTHER; note = 2'-O-methyl modified nucleotide
  modified_base 11: mod_base = OTHER; note = 2'-fluoro modified nucleotide
  modified_base 12: mod_base = OTHER; note = 2'-O-methyl modified nucleotide
  modified_base 13: mod_base = OTHER; note = 2'-fluoro modified nucleotide with phosphorothioate linkage
  modified_base 14: mod_base = OTHER; note = 2'-O-methyl modified nucleotide with phosphorothioate linkage
  misc_difference 15: note = 2'-fluoro modified nucleotide may be attached to trivalent N-Acetylgalactosamine
gttggctcaatgaaa

SEQ ID NO: 880 - RNA, 15 nt, synthetic construct
  source 1..15: mol_type = other RNA
  modified_base 1: mod_base = OTHER; note = 2'-fluoro modified nucleotide with phosphorothioate linkage
  modified_base 2: mod_base = OTHER; note = 2'-O-methyl modified nucleotide with phosphorothioate linkage
  modified_base 3: mod_base = OTHER; note = 2'-fluoro modified nucleotide
  modified_base 4: mod_base = OTHER; note = 2'-O-methyl modified nucleotide
  modified_base 5: mod_base = OTHER; note = 2'-fluoro modified nucleotide
  modified_base 6: mod_base = OTHER; note = 2'-O-methyl modified nucleotide
  modified_base 7: mod_base = OTHER; note = 2'-fluoro modified nucleotide
  modified_base 8: mod_base = OTHER; note = 2'-O-methyl modified nucleotide
  modified_base 9: mod_base = OTHER; note = 2'-fluoro modified nucleotide
  modified_base 10: mod_base = OTHER; note = 2'-O-methyl modified nucleotide
  modified_base 11: mod_base = OTHER; note = 2'-fluoro modified nucleotide
  modified_base 12: mod_base = OTHER; note = 2'-O-methyl modified nucleotide
  modified_base 13: mod_base = OTHER; note = 2'-fluoro modified nucleotide with phosphorothioate linkage
  modified_base 14: mod_base = OTHER; note = 2'-O-methyl modified nucleotide with phosphorothioate linkage
  misc_difference 15: note = 2'-fluoro modified nucleotide may be attached to trivalent N-Acetylgalactosamine
catcatctacctgga

SEQ ID NO: 881 - RNA, 15 nt, synthetic construct
  source 1..15: mol_type = other RNA
  modified_base 1: mod_base = OTHER; note = 2'-fluoro modified nucleotide with phosphorothioate linkage
  modified_base 2: mod_base = OTHER; note = 2'-O-methyl modified nucleotide with phosphorothioate linkage
  modified_base 3: mod_base = OTHER; note = 2'-fluoro modified nucleotide
  modified_base 4: mod_base = OTHER; note = 2'-O-methyl modified nucleotide
  modified_base 5: mod_base = OTHER; note = 2'-fluoro modified nucleotide
  modified_base 6: mod_base = OTHER; note = 2'-O-methyl modified nucleotide
  modified_base 7: mod_base = OTHER; note = 2'-fluoro modified nucleotide
  modified_base 8: mod_base = OTHER; note = 2'-O-methyl modified nucleotide
  modified_base 9: mod_base = OTHER; note = 2'-fluoro modified nucleotide
  modified_base 10: mod_base = OTHER; note = 2'-O-methyl modified nucleotide
  modified_base 11: mod_base = OTHER; note = 2'-fluoro modified nucleotide
  modified_base 12: mod_base = OTHER; note = 2'-O-methyl modified nucleotide
  modified_base 13: mod_base = OTHER; note = 2'-fluoro modified nucleotide with phosphorothioate linkage
  modified_base 14: mod_base = OTHER; note = 2'-O-methyl modified nucleotide with phosphorothioate linkage
  misc_difference 15: note = 2'-fluoro modified nucleotide may be attached to trivalent N-Acetylgalactosamine
ctgaggagaattgca

SEQ ID NO: 882 - RNA, 15 nt, synthetic construct
  source 1..15: mol_type = other RNA
  modified_base 1: mod_base = OTHER; note = 2'-fluoro modified nucleotide with phosphorothioate linkage
  modified_base 2: mod_base = OTHER; note = 2'-O-methyl modified nucleotide with phosphorothioate linkage
  modified_base 3: mod_base = OTHER; note = 2'-fluoro modified nucleotide
  modified_base 4: mod_base = OTHER; note = 2'-O-methyl modified nucleotide
  modified_base 5: mod_base = OTHER; note = 2'-fluoro modified nucleotide
  modified_base 6: mod_base = OTHER; note = 2'-O-methyl modified nucleotide
  modified_base 7: mod_base = OTHER; note = 2'-fluoro modified nucleotide
  modified_base 8: mod_base = OTHER; note = 2'-O-methyl modified nucleotide
  modified_base 9: mod_base = OTHER; note = 2'-fluoro modified nucleotide
  modified_base 10: mod_base = OTHER; note = 2'-O-methyl modified nucleotide
  modified_base 11: mod_base = OTHER; note = 2'-fluoro modified nucleotide
  modified_base 12: mod_base = OTHER; note = 2'-O-methyl modified nucleotide
  modified_base 13: mod_base = OTHER; note = 2'-fluoro modified nucleotide with phosphorothioate linkage
  modified_base 14: mod_base = OTHER; note = 2'-O-methyl modified nucleotide with phosphorothioate linkage
  misc_difference 15: note = 2'-fluoro modified nucleotide may be attached to trivalent N-Acetylgalactosamine
aagatccgagcctaa

SEQ ID NO: 883 - RNA, 15 nt, synthetic construct
  source 1..15: mol_type = other RNA
  modified_base 1: mod_base = OTHER; note = 2'-fluoro modified nucleotide with phosphorothioate linkage
  modified_base 2: mod_base = OTHER; note = 2'-O-methyl modified nucleotide with phosphorothioate linkage
  modified_base 3: mod_base = OTHER; note = 2'-fluoro modified nucleotide
  modified_base 4: mod_base = OTHER; note = 2'-O-methyl modified nucleotide
  modified_base 5: mod_base = OTHER; note = 2'-fluoro modified nucleotide
  modified_base 6: mod_base = OTHER; note = 2'-O-methyl modified nucleotide
  modified_base 7: mod_base = OTHER; note = 2'-fluoro modified nucleotide
  modified_base 8: mod_base = OTHER; note = 2'-O-methyl modified nucleotide
  modified_base 9: mod_base = OTHER; note = 2'-fluoro modified nucleotide
  modified_base 10: mod_base = OTHER; note = 2'-O-methyl modified nucleotide
  modified_base 11: mod_base = OTHER; note = 2'-fluoro modified nucleotide
  modified_base 12: mod_base = OTHER; note = 2'-O-methyl modified nucleotide
  modified_base 13: mod_base = OTHER; note = 2'-fluoro modified nucleotide with phosphorothioate linkage
  modified_base 14: mod_base = OTHER; note = 2'-O-methyl modified nucleotide with phosphorothioate linkage
  misc_difference 15: note = 2'-fluoro modified nucleotide may be attached to trivalent N-Acetylgalactosamine
gagtacatcatggca

SEQ ID NO: 884 - RNA, 15 nt, synthetic construct
  source 1..15: mol_type = other RNA
  modified_base 1: mod_base = OTHER; note = 2'-fluoro modified nucleotide with phosphorothioate linkage
  modified_base 2: mod_base = OTHER; note = 2'-O-methyl modified nucleotide with phosphorothioate linkage
  modified_base 3: mod_base = OTHER; note = 2'-fluoro modified nucleotide
  modified_base 4: mod_base = OTHER; note = 2'-O-methyl modified nucleotide
  modified_base 5: mod_base = OTHER; note = 2'-fluoro modified nucleotide
  modified_base 6: mod_base = OTHER; note = 2'-O-methyl modified nucleotide
  modified_base 7: mod_base = OTHER; note = 2'-fluoro modified nucleotide
  modified_base 8: mod_base = OTHER; note = 2'-O-methyl modified nucleotide
  modified_base 9: mod_base = OTHER; note = 2'-fluoro modified nucleotide
  modified_base 10: mod_base = OTHER; note = 2'-O-methyl modified nucleotide
  modified_base 11: mod_base = OTHER; note = 2'-fluoro modified nucleotide
  modified_base 12: mod_base = OTHER; note = 2'-O-methyl modified nucleotide
  modified_base 13: mod_base = OTHER; note = 2'-fluoro modified nucleotide with phosphorothioate linkage
  modified_base 14: mod_base = OTHER; note = 2'-O-methyl modified nucleotide with phosphorothioate linkage
  misc_difference 15: note = 2'-fluoro modified nucleotide may be attached to trivalent N-Acetylgalactosamine
tgtccaatgacttta

SEQ ID NO: 885 - RNA, 15 nt, synthetic construct
  source 1..15: mol_type = other RNA
  modified_base 1: mod_base = OTHER; note = 2'-fluoro modified nucleotide with phosphorothioate linkage
  modified_base 2: mod_base = OTHER; note = 2'-O-methyl modified nucleotide with phosphorothioate linkage
  modified_base 3: mod_base = OTHER; note = 2'-fluoro modified nucleotide
  modified_base 4: mod_base = OTHER; note = 2'-O-methyl modified nucleotide
  modified_base 5: mod_base = OTHER; note = 2'-fluoro modified nucleotide
  modified_base 6: mod_base = OTHER; note = 2'-O-methyl modified nucleotide
  modified_base 7: mod_base = OTHER; note = 2'-fluoro modified nucleotide
  modified_base 8: mod_base = OTHER; note = 2'-O-methyl modified nucleotide
  modified_base 9: mod_base = OTHER; note = 2'-fluoro modified nucleotide
  modified_base 10: mod_base = OTHER; note = 2'-O-methyl modified nucleotide
  modified_base 11: mod_base = OTHER; note = 2'-fluoro modified nucleotide
  modified_base 12: mod_base = OTHER; note = 2'-O-methyl modified nucleotide
  modified_base 13: mod_base = OTHER; note = 2'-fluoro modified nucleotide with phosphorothioate linkage
  modified_base 14: mod_base = OTHER; note = 2'-O-methyl modified nucleotide with phosphorothioate linkage
  misc_difference 15: note = 2'-fluoro modified nucleotide may be attached to trivalent N-Acetylgalactosamine
catctccaagtatga

SEQ ID NO: 886 - RNA, 15 nt, synthetic construct
  source 1..15: mol_type = other RNA
  modified_base 1: mod_base = OTHER; note = 2'-fluoro modified nucleotide with phosphorothioate linkage
  modified_base 2: mod_base = OTHER; note = 2'-O-methyl modified nucleotide with phosphorothioate linkage
  modified_base 3: mod_base = OTHER; note = 2'-fluoro modified nucleotide
  modified_base 4: mod_base = OTHER; note = 2'-O-methyl modified nucleotide
  modified_base 5: mod_base = OTHER; note = 2'-fluoro modified nucleotide
  modified_base 6: mod_base = OTHER; note = 2'-O-methyl modified nucleotide
  modified_base 7: mod_base = OTHER; note = 2'-fluoro modified nucleotide
  modified_base 8: mod_base = OTHER; note = 2'-O-methyl modified nucleotide
  modified_base 9: mod_base = OTHER; note = 2'-fluoro modified nucleotide
  modified_base 10: mod_base = OTHER; note = 2'-O-methyl modified nucleotide
  modified_base 11: mod_base = OTHER; note = 2'-fluoro modified nucleotide
  modified_base 12: mod_base = OTHER; note = 2'-O-methyl modified nucleotide
  modified_base 13: mod_base = OTHER; note = 2'-fluoro modified nucleotide with phosphorothioate linkage
  modified_base 14: mod_base = OTHER; note = 2'-O-methyl modified nucleotide with phosphorothioate linkage
  misc_difference 15: note = 2'-fluoro modified nucleotide may be attached to trivalent N-Acetylgalactosamine
cagatacatctccaa

SEQ ID NO: 887 - RNA, 15 nt, synthetic construct
  source 1..15: mol_type = other RNA
  modified_base 1: mod_base = OTHER; note = 2'-fluoro modified nucleotide with phosphorothioate linkage
  modified_base 2: mod_base = OTHER; note = 2'-O-methyl modified nucleotide with phosphorothioate linkage
  modified_base 3: mod_base = OTHER; note = 2'-fluoro modified nucleotide
  modified_base 4: mod_base = OTHER; note = 2'-O-methyl modified nucleotide
  modified_base 5: mod_base = OTHER; note = 2'-fluoro modified nucleotide
  modified_base 6: mod_base = OTHER; note = 2'-O-methyl modified nucleotide
  modified_base 7: mod_base = OTHER; note = 2'-fluoro modified nucleotide
  modified_base 8: mod_base = OTHER; note = 2'-O-methyl modified nucleotide
  modified_base 9: mod_base = OTHER; note = 2'-fluoro modified nucleotide
  modified_base 10: mod_base = OTHER; note = 2'-O-methyl modified nucleotide
  modified_base 11: mod_base = OTHER; note = 2'-fluoro modified nucleotide
  modified_base 12: mod_base = OTHER; note = 2'-O-methyl modified nucleotide
  modified_base 13: mod_base = OTHER; note = 2'-fluoro modified nucleotide with phosphorothioate linkage
  modified_base 14: mod_base = OTHER; note = 2'-O-methyl modified nucleotide with phosphorothioate linkage
  misc_difference 15: note = 2'-fluoro modified nucleotide may be attached to trivalent N-Acetylgalactosamine
aaagactccatcaca

SEQ ID NO: 888 - RNA, 15 nt, synthetic construct
  source 1..15: mol_type = other RNA
  modified_base 1: mod_base = OTHER; note = 2'-fluoro modified nucleotide with phosphorothioate linkage
  modified_base 2: mod_base = OTHER; note = 2'-O-methyl modified nucleotide with phosphorothioate linkage
  modified_base 3: mod_base = OTHER; note = 2'-fluoro modified nucleotide
  modified_base 4: mod_base = OTHER; note = 2'-O-methyl modified nucleotide
  modified_base 5: mod_base = OTHER; note = 2'-fluoro modified nucleotide
  modified_base 6: mod_base = OTHER; note = 2'-O-methyl modified nucleotide
  modified_base 7: mod_base = OTHER; note = 2'-fluoro modified nucleotide
  modified_base 8: mod_base = OTHER; note = 2'-O-methyl modified nucleotide
  modified_base 9: mod_base = OTHER; note = 2'-fluoro modified nucleotide
  modified_base 10: mod_base = OTHER; note = 2'-O-methyl modified nucleotide
  modified_base 11: mod_base = OTHER; note = 2'-fluoro modified nucleotide
  modified_base 12: mod_base = OTHER; note = 2'-O-methyl modified nucleotide
  modified_base 13: mod_base = OTHER; note = 2'-fluoro modified nucleotide with phosphorothioate linkage
  modified_base 14: mod_base = OTHER; note = 2'-O-methyl modified nucleotide with phosphorothioate linkage
  misc_difference 15: note = 2'-fluoro modified nucleotide may be attached to trivalent N-Acetylgalactosamine
gatcctacactgtga

SEQ ID NO: 889 - RNA, 15 nt, synthetic construct
  source 1..15: mol_type = other RNA
  modified_base 1: mod_base = OTHER; note = 2'-fluoro modified nucleotide with phosphorothioate linkage
  modified_base 2: mod_base = OTHER; note = 2'-O-methyl modified nucleotide with phosphorothioate linkage
  modified_base 3: mod_base = OTHER; note = 2'-fluoro modified nucleotide
  modified_base 4: mod_base = OTHER; note = 2'-O-methyl modified nucleotide
  modified_base 5: mod_base = OTHER; note = 2'-fluoro modified nucleotide
  modified_base 6: mod_base = OTHER; note = 2'-O-methyl modified nucleotide
  modified_base 7: mod_base = OTHER; note = 2'-fluoro modified nucleotide
  modified_base 8: mod_base = OTHER; note = 2'-O-methyl modified nucleotide
  modified_base 9: mod_base = OTHER; note = 2'-fluoro modified nucleotide
  modified_base 10: mod_base = OTHER; note = 2'-O-methyl modified nucleotide
  modified_base 11: mod_base = OTHER; note = 2'-fluoro modified nucleotide
  modified_base 12: mod_base = OTHER; note = 2'-O-methyl modified nucleotide
  modified_base 13: mod_base = OTHER; note = 2'-fluoro modified nucleotide with phosphorothioate linkage
  modified_base 14: mod_base = OTHER; note = 2'-O-methyl modified nucleotide with phosphorothioate linkage
  misc_difference 15: note = 2'-fluoro modified nucleotide may be attached to trivalent N-Acetylgalactosamine
tttcacagtcacaga

SEQ ID NO: 890 - RNA, 15 nt, synthetic construct
  source 1..15: mol_type = other RNA
  modified_base 1: mod_base = OTHER; note = 2'-fluoro modified nucleotide with phosphorothioate linkage
  modified_base 2: mod_base = OTHER; note = 2'-O-methyl modified nucleotide with phosphorothioate linkage
  modified_base 3: mod_base = OTHER; note = 2'-fluoro modified nucleotide
  modified_base 4: mod_base = OTHER; note = 2'-O-methyl modified nucleotide
  modified_base 5: mod_base = OTHER; note = 2'-fluoro modified nucleotide
  modified_base 6: mod_base = OTHER; note = 2'-O-methyl modified nucleotide
  modified_base 7: mod_base = OTHER; note = 2'-fluoro modified nucleotide
  modified_base 8: mod_base = OTHER; note = 2'-O-methyl modified nucleotide
  modified_base 9: mod_base = OTHER; note = 2'-fluoro modified nucleotide
  modified_base 10: mod_base = OTHER; note = 2'-O-methyl modified nucleotide
  modified_base 11: mod_base = OTHER; note = 2'-fluoro modified nucleotide
  modified_base 12: mod_base = OTHER; note = 2'-O-methyl modified nucleotide
  modified_base 13: mod_base = OTHER; note = 2'-fluoro modified nucleotide with phosphorothioate linkage
  modified_base 14: mod_base = OTHER; note = 2'-O-methyl modified nucleotide with phosphorothioate linkage
  misc_difference 15: note = 2'-fluoro modified nucleotide may be attached to trivalent N-Acetylgalactosamine
cgtgggagattctga

SEQ ID NO: 891 - RNA, 15 nt, synthetic construct
  source 1..15: mol_type = other RNA
  modified_base 1: mod_base = OTHER; note = 2'-fluoro modified nucleotide with phosphorothioate linkage
  modified_base 2: mod_base = OTHER; note = 2'-O-methyl modified nucleotide with phosphorothioate linkage
  modified_base 3: mod_base = OTHER; note = 2'-fluoro modified nucleotide
  modified_base 4: mod_base = OTHER; note = 2'-O-methyl modified nucleotide
  modified_base 5: mod_base = OTHER; note = 2'-fluoro modified nucleotide
  modified_base 6: mod_base = OTHER; note = 2'-O-methyl modified nucleotide
  modified_base 7: mod_base = OTHER; note = 2'-fluoro modified nucleotide
  modified_base 8: mod_base = OTHER; note = 2'-O-methyl modified nucleotide
  modified_base 9: mod_base = OTHER; note = 2'-fluoro modified nucleotide
  modified_base 10: mod_base = OTHER; note = 2'-O-methyl modified nucleotide
  modified_base 11: mod_base = OTHER; note = 2'-fluoro modified nucleotide
  modified_base 12: mod_base = OTHER; note = 2'-O-methyl modified nucleotide
  modified_base 13: mod_base = OTHER; note = 2'-fluoro modified nucleotide with phosphorothioate linkage
  modified_base 14: mod_base = OTHER; note = 2'-O-methyl modified nucleotide with phosphorothioate linkage
  misc_difference 15: note = 2'-fluoro modified nucleotide may be attached to trivalent N-Acetylgalactosamine
catcactaaagcaga

SEQ ID NO: 892 - RNA, 15 nt, synthetic construct
  source 1..15: mol_type = other RNA
  modified_base 1: mod_base = OTHER; note = 2'-fluoro modified nucleotide with phosphorothioate linkage
  modified_base 2: mod_base = OTHER; note = 2'-O-methyl modified nucleotide with phosphorothioate linkage
  modified_base 3: mod_base = OTHER; note = 2'-fluoro modified nucleotide
  modified_base 4: mod_base = OTHER; note = 2'-O-methyl modified nucleotide
  modified_base 5: mod_base = OTHER; note = 2'-fluoro modified nucleotide
  modified_base 6: mod_base = OTHER; note = 2'-O-methyl modified nucleotide
  modified_base 7: mod_base = OTHER; note = 2'-fluoro modified nucleotide
  modified_base 8: mod_base = OTHER; note = 2'-O-methyl modified nucleotide
  modified_base 9: mod_base = OTHER; note = 2'-fluoro modified nucleotide
  modified_base 10: mod_base = OTHER; note = 2'-O-methyl modified nucleotide
  modified_base 11: mod_base = OTHER; note = 2'-fluoro modified nucleotide
  modified_base 12: mod_base = OTHER; note = 2'-O-methyl modified nucleotide
  modified_base 13: mod_base = OTHER; note = 2'-fluoro modified nucleotide with phosphorothioate linkage
  modified_base 14: mod_base = OTHER; note = 2'-O-methyl modified nucleotide with phosphorothioate linkage
  misc_difference 15: note = 2'-fluoro modified nucleotide may be attached to trivalent N-Acetylgalactosamine
taggaacaccctcaa

SEQ ID NO: 893 - RNA, 15 nt, synthetic construct
  source 1..15: mol_type = other RNA
  modified_base 1: mod_base = OTHER; note = 2'-fluoro modified nucleotide with phosphorothioate linkage
  modified_base 2: mod_base = OTHER; note = 2'-O-methyl modified nucleotide with phosphorothioate linkage
  modified_base 3: mod_base = OTHER; note = 2'-fluoro modified nucleotide
  modified_base 4: mod_base = OTHER; note = 2'-O-methyl modified nucleotide
  modified_base 5: mod_base = OTHER; note = 2'-fluoro modified nucleotide
  modified_base 6: mod_base = OTHER; note = 2'-O-methyl modified nucleotide
  modified_base 7: mod_base = OTHER; note = 2'-fluoro modified nucleotide
  modified_base 8: mod_base = OTHER; note = 2'-O-methyl modified nucleotide
  modified_base 9: mod_base = OTHER; note = 2'-fluoro modified nucleotide
  modified_base 10: mod_base = OTHER; note = 2'-O-methyl modified nucleotide
  modified_base 11: mod_base = OTHER; note = 2'-fluoro modified nucleotide
  modified_base 12: mod_base = OTHER; note = 2'-O-methyl modified nucleotide
  modified_base 13: mod_base = OTHER; note = 2'-fluoro modified nucleotide with phosphorothioate linkage
  modified_base 14: mod_base = OTHER; note = 2'-O-methyl modified nucleotide with phosphorothioate linkage
  misc_difference 15: note = 2'-fluoro modified nucleotide may be attached to trivalent N-Acetylgalactosamine
caatgtaccatgcta

SEQ ID NO: 894 - RNA, 15 nt, synthetic construct
  source 1..15: mol_type = other RNA
  modified_base 1: mod_base = OTHER; note = 2'-fluoro modified nucleotide with phosphorothioate linkage
  modified_base 2: mod_base = OTHER; note = 2'-O-methyl modified nucleotide with phosphorothioate linkage
  modified_base 3: mod_base = OTHER; note = 2'-fluoro modified nucleotide
  modified_base 4: mod_base = OTHER; note = 2'-O-methyl modified nucleotide
  modified_base 5: mod_base = OTHER; note = 2'-fluoro modified nucleotide
  modified_base 6: mod_base = OTHER; note = 2'-O-methyl modified nucleotide
  modified_base 7: mod_base = OTHER; note = 2'-fluoro modified nucleotide
  modified_base 8: mod_base = OTHER; note = 2'-O-methyl modified nucleotide
  modified_base 9: mod_base = OTHER; note = 2'-fluoro modified nucleotide
  modified_base 10: mod_base = OTHER; note = 2'-O-methyl modified nucleotide
  modified_base 11: mod_base = OTHER; note = 2'-fluoro modified nucleotide
  modified_base 12: mod_base = OTHER; note = 2'-O-methyl modified nucleotide
  modified_base 13: mod_base = OTHER; note = 2'-fluoro modified nucleotide with phosphorothioate linkage
  modified_base 14: mod_base = OTHER; note = 2'-O-methyl modified nucleotide with phosphorothioate linkage
  misc_difference 15: note = 2'-fluoro modified nucleotide may be attached to trivalent N-Acetylgalactosamine
ataggaacaccctca

SEQ ID NO: 895 - RNA, 15 nt, synthetic construct
  source 1..15: mol_type = other RNA
  modified_base 1: mod_base = OTHER; note = 2'-fluoro modified nucleotide with phosphorothioate linkage
  modified_base 2: mod_base = OTHER; note = 2'-O-methyl modified nucleotide with phosphorothioate linkage
  modified_base 3: mod_base = OTHER; note = 2'-fluoro modified nucleotide
  modified_base 4: mod_base = OTHER; note = 2'-O-methyl modified nucleotide
  modified_base 5: mod_base = OTHER; note = 2'-fluoro modified nucleotide
  modified_base 6: mod_base = OTHER; note = 2'-O-methyl modified nucleotide
  modified_base 7: mod_base = OTHER; note = 2'-fluoro modified nucleotide
  modified_base 8: mod_base = OTHER; note = 2'-O-methyl modified nucleotide
  modified_base 9: mod_base = OTHER; note = 2'-fluoro modified nucleotide
  modified_base 10: mod_base = OTHER; note = 2'-O-methyl modified nucleotide
  modified_base 11: mod_base = OTHER; note = 2'-fluoro modified nucleotide
  modified_base 12: mod_base = OTHER; note = 2'-O-methyl modified nucleotide
  modified_base 13: mod_base = OTHER; note = 2'-fluoro modified nucleotide with phosphorothioate linkage
  modified_base 14: mod_base = OTHER; note = 2'-O-methyl modified nucleotide with phosphorothioate linkage
  misc_difference 15: note = 2'-fluoro modified nucleotide may be attached to trivalent N-Acetylgalactosamine
cagagaaattctaca

SEQ ID NO: 896 - RNA, 15 nt, synthetic construct
  source 1..15: mol_type = other RNA
  modified_base 1: mod_base = OTHER; note = 2'-fluoro modified nucleotide with phosphorothioate linkage
  modified_base 2: mod_base = OTHER; note = 2'-O-methyl modified nucleotide with phosphorothioate linkage
  modified_base 3: mod_base = OTHER; note = 2'-fluoro modified nucleotide
  modified_base 4: mod_base = OTHER; note = 2'-O-methyl modified nucleotide
  modified_base 5: mod_base = OTHER; note = 2'-fluoro modified nucleotide
  modified_base 6: mod_base = OTHER; note = 2'-O-methyl modified nucleotide
  modified_base 7: mod_base = OTHER; note = 2'-fluoro modified nucleotide
  modified_base 8: mod_base = OTHER; note = 2'-O-methyl modified nucleotide
  modified_base 9: mod_base = OTHER; note = 2'-fluoro modified nucleotide
  modified_base 10: mod_base = OTHER; note = 2'-O-methyl modified nucleotide
  modified_base 11: mod_base = OTHER; note = 2'-fluoro modified nucleotide
  modified_base 12: mod_base = OTHER; note = 2'-O-methyl modified nucleotide
  modified_base 13: mod_base = OTHER; note = 2'-fluoro modified nucleotide with phosphorothioate linkage
  modified_base 14: mod_base = OTHER; note = 2'-O-methyl modified nucleotide with phosphorothioate linkage
  misc_difference 15: note = 2'-fluoro modified nucleotide may be attached to trivalent N-Acetylgalactosamine
tttcaaagttcacca

SEQ ID NO: 897 - RNA, 15 nt, synthetic construct
  source 1..15: mol_type = other RNA
  modified_base 1: mod_base = OTHER; note = 2'-fluoro modified nucleotide with phosphorothioate linkage
  modified_base 2: mod_base = OTHER; note = 2'-O-methyl modified nucleotide with phosphorothioate linkage
  modified_base 3: mod_base = OTHER; note = 2'-fluoro modified nucleotide
  modified_base 4: mod_base = OTHER; note = 2'-O-methyl modified nucleotide
  modified_base 5: mod_base = OTHER; note = 2'-fluoro modified nucleotide
  modified_base 6: mod_base = OTHER; note = 2'-O-methyl modified nucleotide
  modified_base 7: mod_base = OTHER; note = 2'-fluoro modified nucleotide
  modified_base 8: mod_base = OTHER; note = 2'-O-methyl modified nucleotide
  modified_base 9: mod_base = OTHER; note = 2'-fluoro modified nucleotide
  modified_base 10: mod_base = OTHER; note = 2'-O-methyl modified nucleotide
  modified_base 11: mod_base = OTHER; note = 2'-fluoro modified nucleotide
  modified_base 12: mod_base = OTHER; note = 2'-O-methyl modified nucleotide
  modified_base 13: mod_base = OTHER; note = 2'-fluoro modified nucleotide with phosphorothioate linkage
  modified_base 14: mod_base = OTHER; note = 2'-O-methyl modified nucleotide with phosphorothioate linkage
  misc_difference 15: note = 2'-fluoro modified nucleotide may be attached to trivalent N-Acetylgalactosamine
actcgtcaacatgga

SEQ ID NO: 898 - RNA, 15 nt, synthetic construct
  source 1..15: mol_type = other RNA
  modified_base 1: mod_base = OTHER; note = 2'-fluoro modified nucleotide with phosphorothioate linkage
  modified_base 2: mod_base = OTHER; note = 2'-O-methyl modified nucleotide with phosphorothioate linkage
  modified_base 3: mod_base = OTHER; note = 2'-fluoro modified nucleotide
  modified_base 4: mod_base = OTHER; note = 2'-O-methyl modified nucleotide
  modified_base 5: mod_base = OTHER; note = 2'-fluoro modified nucleotide
  modified_base 6: mod_base = OTHER; note = 2'-O-methyl modified nucleotide
  modified_base 7: mod_base = OTHER; note = 2'-fluoro modified nucleotide
  modified_base 8: mod_base = OTHER; note = 2'-O-methyl modified nucleotide
  modified_base 9: mod_base = OTHER; note = 2'-fluoro modified nucleotide
  modified_base 10: mod_base = OTHER; note = 2'-O-methyl modified nucleotide
  modified_base 11: mod_base = OTHER; note = 2'-fluoro modified nucleotide
  modified_base 12: mod_base = OTHER; note = 2'-O-methyl modified nucleotide
  modified_base 13: mod_base = OTHER; note = 2'-fluoro modified nucleotide with phosphorothioate linkage
  modified_base 14: mod_base = OTHER; note = 2'-O-methyl modified nucleotide with phosphorothioate linkage
  misc_difference 15: note = 2'-fluoro modified nucleotide may be attached to trivalent N-Acetylgalactosamine
caattacctgcatca

SEQ ID NO: 899 - RNA, 15 nt, synthetic construct
  source 1..15: mol_type = other RNA
  modified_base 1: mod_base = OTHER; note = 2'-fluoro modified nucleotide with phosphorothioate linkage
  modified_base 2: mod_base = OTHER; note = 2'-O-methyl modified nucleotide with phosphorothioate linkage
  modified_base 3: mod_base = OTHER; note = 2'-fluoro modified nucleotide
  modified_base 4: mod_base = OTHER; note = 2'-O-methyl modified nucleotide
  modified_base 5: mod_base = OTHER; note = 2'-fluoro modified nucleotide
  modified_base 6: mod_base = OTHER; note = 2'-O-methyl modified nucleotide
  modified_base 7: mod_base = OTHER; note = 2'-fluoro modified nucleotide
  modified_base 8: mod_base = OTHER; note = 2'-O-methyl modified nucleotide
  modified_base 9: mod_base = OTHER; note = 2'-fluoro modified nucleotide
  modified_base 10: mod_base = OTHER; note = 2'-O-methyl modified nucleotide
  modified_base 11: mod_base = OTHER; note = 2'-fluoro modified nucleotide
  modified_base 12: mod_base = OTHER; note = 2'-O-methyl modified nucleotide
  modified_base 13: mod_base = OTHER; note = 2'-fluoro modified nucleotide with phosphorothioate linkage
  modified_base 14: mod_base = OTHER; note = 2'-O-methyl modified nucleotide with phosphorothioate linkage
  misc_difference 15: note = 2'-fluoro modified nucleotide may be attached to trivalent N-Acetylgalactosamine
tctgtaccaggtaca

SEQ ID NO: 900 - RNA, 15 nt, synthetic construct
  source 1..15: mol_type = other RNA
  modified_base 1: mod_base = OTHER; note = 2'-fluoro modified nucleotide with phosphorothioate linkage
  modified_base 2: mod_base = OTHER; note = 2'-O-methyl modified nucleotide with phosphorothioate linkage
  modified_base 3: mod_base = OTHER; note = 2'-fluoro modified nucleotide
  modified_base 4: mod_base = OTHER; note = 2'-O-methyl modified nucleotide
  modified_base 5: mod_base = OTHER; note = 2'-fluoro modified nucleotide
  modified_base 6: mod_base = OTHER; note = 2'-O-methyl modified nucleotide
  modified_base 7: mod_base = OTHER; note = 2'-fluoro modified nucleotide
  modified_base 8: mod_base = OTHER; note = 2'-O-methyl modified nucleotide
  modified_base 9: mod_base = OTHER; note = 2'-fluoro modified nucleotide
  modified_base 10: mod_base = OTHER; note = 2'-O-methyl modified nucleotide
  modified_base 11: mod_base = OTHER; note = 2'-fluoro modified nucleotide
  modified_base 12: mod_base = OTHER; note = 2'-O-methyl modified nucleotide
  modified_base 13: mod_base = OTHER; note = 2'-fluoro modified nucleotide with phosphorothioate linkage
  modified_base 14: mod_base = OTHER; note = 2'-O-methyl modified nucleotide with phosphorothioate linkage
  misc_difference 15: note = 2'-fluoro modified nucleotide may be attached to trivalent N-Acetylgalactosamine
aactccaacaattaa

SEQ ID NO: 901 - RNA, 15 nt, synthetic construct
  source 1..15: mol_type = other RNA
  modified_base 1: mod_base = OTHER; note = 2'-fluoro modified nucleotide with phosphorothioate linkage
  modified_base 2: mod_base = OTHER; note = 2'-O-methyl modified nucleotide with phosphorothioate linkage
  modified_base 3: mod_base = OTHER; note = 2'-fluoro modified nucleotide
  modified_base 4: mod_base = OTHER; note = 2'-O-methyl modified nucleotide
  modified_base 5: mod_base = OTHER; note = 2'-fluoro modified nucleotide
  modified_base 6: mod_base = OTHER; note = 2'-O-methyl modified nucleotide
  modified_base 7: mod_base = OTHER; note = 2'-fluoro modified nucleotide
  modified_base 8: mod_base = OTHER; note = 2'-O-methyl modified nucleotide
  modified_base 9: mod_base = OTHER; note = 2'-fluoro modified nucleotide
  modified_base 10: mod_base = OTHER; note = 2'-O-methyl modified nucleotide
  modified_base 11: mod_base = OTHER; note = 2'-fluoro modified nucleotide
  modified_base 12: mod_base = OTHER; note = 2'-O-methyl modified nucleotide
  modified_base 13: mod_base = OTHER; note = 2'-fluoro modified nucleotide with phosphorothioate linkage
  modified_base 14: mod_base = OTHER; note = 2'-O-methyl modified nucleotide with phosphorothioate linkage
  misc_difference 15: note = 2'-fluoro modified nucleotide may be attached to trivalent N-Acetylgalactosamine
caactccaacaatta

SEQ ID NO: 902 - RNA, 15 nt, synthetic construct
  source 1..15: mol_type = other RNA
  modified_base 1: mod_base = OTHER; note = 2'-fluoro modified nucleotide with phosphorothioate linkage
  modified_base 2: mod_base = OTHER; note = 2'-O-methyl modified nucleotide with phosphorothioate linkage
  modified_base 3: mod_base = OTHER; note = 2'-fluoro modified nucleotide
  modified_base 4: mod_base = OTHER; note = 2'-O-methyl modified nucleotide
  modified_base 5: mod_base = OTHER; note = 2'-fluoro modified nucleotide
  modified_base 6: mod_base = OTHER; note = 2'-O-methyl modified nucleotide
  modified_base 7: mod_base = OTHER; note = 2'-fluoro modified nucleotide
  modified_base 8: mod_base = OTHER; note = 2'-O-methyl modified nucleotide
  modified_base 9: mod_base = OTHER; note = 2'-fluoro modified nucleotide
  modified_base 10: mod_base = OTHER; note = 2'-O-methyl modified nucleotide
  modified_base 11: mod_base = OTHER; note = 2'-fluoro modified nucleotide
  modified_base 12: mod_base = OTHER; note = 2'-O-methyl modified nucleotide
  modified_base 13: mod_base = OTHER; note = 2'-fluoro modified nucleotide with phosphorothioate linkage
  modified_base 14: mod_base = OTHER; note = 2'-O-methyl modified nucleotide with phosphorothioate linkage
  misc_difference 15: note = 2'-fluoro modified nucleotide may be attached to trivalent N-Acetylgalactosamine
gatccaggatggcga

SEQ ID NO: 903 - RNA, 15 nt, synthetic construct
  source 1..15: mol_type = other RNA
  modified_base 1: mod_base = OTHER; note = 2'-fluoro modified nucleotide with phosphorothioate linkage
  modified_base 2: mod_base = OTHER; note = 2'-O-methyl modified nucleotide with phosphorothioate linkage
  modified_base 3: mod_base = OTHER; note = 2'-fluoro modified nucleotide
  modified_base 4: mod_base = OTHER; note = 2'-O-methyl modified nucleotide
  modified_base 5: mod_base = OTHER; note = 2'-fluoro modified nucleotide
  modified_base 6: mod_base = OTHER; note = 2'-O-methyl modified nucleotide
  modified_base 7: mod_base = OTHER; note = 2'-fluoro modified nucleotide
  modified_base 8: mod_base = OTHER; note = 2'-O-methyl modified nucleotide
  modified_base 9: mod_base = OTHER; note = 2'-fluoro modified nucleotide
  modified_base 10: mod_base = OTHER; note = 2'-O-methyl modified nucleotide
  modified_base 11: mod_base = OTHER; note = 2'-fluoro modified nucleotide
  modified_base 12: mod_base = OTHER; note = 2'-O-methyl modified nucleotide
  modified_base 13: mod_base = OTHER; note = 2'-fluoro modified nucleotide with phosphorothioate linkage
  modified_base 14: mod_base = OTHER; note = 2'-O-methyl modified nucleotide with phosphorothioate linkage
  misc_difference 15: note = 2'-fluoro modified nucleotide may be attached to trivalent N-Acetylgalactosamine
ctacagagaaattca

SEQ ID NO: 904 - RNA, 15 nt, synthetic construct
  source 1..15: mol_type = other RNA
  modified_base 1: mod_base = OTHER; note = 2'-fluoro modified nucleotide with phosphorothioate linkage
  modified_base 2: mod_base = OTHER; note = 2'-O-methyl modified nucleotide with phosphorothioate linkage
  modified_base 3: mod_base = OTHER; note = 2'-fluoro modified nucleotide
  modified_base 4: mod_base = OTHER; note = 2'-O-methyl modified nucleotide
  modified_base 5: mod_base = OTHER; note = 2'-fluoro modified nucleotide
  modified_base 6: mod_base = OTHER; note = 2'-O-methyl modified nucleotide
  modified_base 7: mod_base = OTHER; note = 2'-fluoro modified nucleotide
  modified_base 8: mod_base = OTHER; note = 2'-O-methyl modified nucleotide
  modified_base 9: mod_base = OTHER; note = 2'-fluoro modified nucleotide
  modified_base 10: mod_base = OTHER; note = 2'-O-methyl modified nucleotide
  modified_base 11: mod_base = OTHER; note = 2'-fluoro modified nucleotide
  modified_base 12: mod_base = OTHER; note = 2'-O-methyl modified nucleotide
  modified_base 13: mod_base = OTHER; note = 2'-fluoro modified nucleotide with phosphorothioate linkage
  modified_base 14: mod_base = OTHER; note = 2'-O-methyl modified nucleotide with phosphorothioate linkage
  misc_difference 15: note = 2'-fluoro modified nucleotide may be attached to trivalent N-Acetylgalactosamine
gctaaaagactttga

SEQ ID NO: 905 - RNA, 15 nt, synthetic construct
  source 1..15: mol_type = other RNA
  modified_base 1: mod_base = OTHER; note = 2'-fluoro modified nucleotide with phosphorothioate linkage
  modified_base 2: mod_base = OTHER; note = 2'-O-methyl modified nucleotide with phosphorothioate linkage
  modified_base 3: mod_base = OTHER; note = 2'-fluoro modified nucleotide
  modified_base 4: mod_base = OTHER; note = 2'-O-methyl modified nucleotide
  modified_base 5: mod_base = OTHER; note = 2'-fluoro modified nucleotide
  modified_base 6: mod_base = OTHER; note = 2'-O-methyl modified nucleotide
  modified_base 7: mod_base = OTHER; note = 2'-fluoro modified nucleotide
  modified_base 8: mod_base = OTHER; note = 2'-O-methyl modified nucleotide
  modified_base 9: mod_base = OTHER; note = 2'-fluoro modified nucleotide
  modified_base 10: mod_base = OTHER; note = 2'-O-methyl modified nucleotide
  modified_base 11: mod_base = OTHER; note = 2'-fluoro modified nucleotide
  modified_base 12: mod_base = OTHER; note = 2'-O-methyl modified nucleotide
  modified_base 13: mod_base = OTHER; note = 2'-fluoro modified nucleotide with phosphorothioate linkage
  modified_base 14: mod_base = OTHER; note = 2'-O-methyl modified nucleotide with phosphorothioate linkage
  misc_difference 15: note = 2'-fluoro modified nucleotide may be attached to trivalent N-Acetylgalactosamine
cattccggaactcga

SEQ ID NO: 906 - RNA, 15 nt, synthetic construct
  source 1..15: mol_type = other RNA
  modified_base 1: mod_base = OTHER; note = 2'-fluoro modified nucleotide with phosphorothioate linkage
  modified_base 2: mod_base = OTHER; note = 2'-O-methyl modified nucleotide with phosphorothioate linkage
  modified_base 3: mod_base = OTHER; note = 2'-fluoro modified nucleotide
  modified_base 4: mod_base = OTHER; note = 2'-O-methyl modified nucleotide
  modified_base 5: mod_base = OTHER; note = 2'-fluoro modified nucleotide
  modified_base 6: mod_base = OTHER; note = 2'-O-methyl modified nucleotide
  modified_base 7: mod_base = OTHER; note = 2'-fluoro modified nucleotide
  modified_base 8: mod_base = OTHER; note = 2'-O-methyl modified nucleotide
  modified_base 9: mod_base = OTHER; note = 2'-fluoro modified nucleotide
  modified_base 10: mod_base = OTHER; note = 2'-O-methyl modified nucleotide
  modified_base 11: mod_base = OTHER; note = 2'-fluoro modified nucleotide
  modified_base 12: mod_base = OTHER; note = 2'-O-methyl modified nucleotide
  modified_base 13: mod_base = OTHER; note = 2'-fluoro modified nucleotide with phosphorothioate linkage
  modified_base 14: mod_base = OTHER; note = 2'-O-methyl modified nucleotide with phosphorothioate linkage
  misc_difference 15: note = 2'-fluoro modified nucleotide may be attached to trivalent N-Acetylgalactosamine
gaggagaattgctta

SEQ ID NO: 907 - RNA, 15 nt, synthetic construct
  source 1..15: mol_type = other RNA
  modified_base 1: mod_base = OTHER; note = 2'-fluoro modified nucleotide with phosphorothioate linkage
  modified_base 2: mod_base = OTHER; note = 2'-O-methyl modified nucleotide with phosphorothioate linkage
  modified_base 3: mod_base = OTHER; note = 2'-fluoro modified nucleotide
  modified_base 4: mod_base = OTHER; note = 2'-O-methyl modified nucleotide
  modified_base 5: mod_base = OTHER; note = 2'-fluoro modified nucleotide
  modified_base 6: mod_base = OTHER; note = 2'-O-methyl modified nucleotide
  modified_base 7: mod_base = OTHER; note = 2'-fluoro modified nucleotide
  modified_base 8: mod_base = OTHER; note = 2'-O-methyl modified nucleotide
  modified_base 9: mod_base = OTHER; note = 2'-fluoro modified nucleotide
  modified_base 10: mod_base = OTHER; note = 2'-O-methyl modified nucleotide
  modified_base 11: mod_base = OTHER; note = 2'-fluoro modified nucleotide
  modified_base 12: mod_base = OTHER; note = 2'-O-methyl modified nucleotide
  modified_base 13: mod_base = OTHER; note = 2'-fluoro modified nucleotide with phosphorothioate linkage
  modified_base 14: mod_base = OTHER; note = 2'-O-methyl modified nucleotide with phosphorothioate linkage
  misc_difference 15: note = 2'-fluoro modified nucleotide may be attached to trivalent N-Acetylgalactosamine
aagagaacatcgtta

SEQ ID NO: 908 - RNA, 15 nt, synthetic construct
  source 1..15: mol_type = other RNA
  modified_base 1: mod_base = OTHER; note = 2'-fluoro modified nucleotide with phosphorothioate linkage
  modified_base 2: mod_base = OTHER; note = 2'-O-methyl modified nucleotide with phosphorothioate linkage
  modified_base 3: mod_base = OTHER; note = 2'-fluoro modified nucleotide
  modified_base 4: mod_base = OTHER; note = 2'-O-methyl modified nucleotide
  modified_base 5: mod_base = OTHER; note = 2'-fluoro modified nucleotide
  modified_base 6: mod_base = OTHER; note = 2'-O-methyl modified nucleotide
  modified_base 7: mod_base = OTHER; note = 2'-fluoro modified nucleotide
  modified_base 8: mod_base = OTHER; note = 2'-O-methyl modified nucleotide
  modified_base 9: mod_base = OTHER; note = 2'-fluoro modified nucleotide
  modified_base 10: mod_base = OTHER; note = 2'-O-methyl modified nucleotide
  modified_base 11: mod_base = OTHER; note = 2'-fluoro modified nucleotide
  modified_base 12: mod_base = OTHER; note = 2'-O-methyl modified nucleotide
  modified_base 13: mod_base = OTHER; note = 2'-fluoro modified nucleotide with phosphorothioate linkage
  modified_base 14: mod_base = OTHER; note = 2'-O-methyl modified nucleotide with phosphorothioate linkage
  misc_difference 15: note = 2'-fluoro modified nucleotide may be attached to trivalent N-Acetylgalactosamine
catcttcgggatcca

SEQ ID NO: 909 - RNA, 15 nt, synthetic construct
  source 1..15: mol_type = other RNA
  modified_base 1: mod_base = OTHER; note = 2'-fluoro modified nucleotide with phosphorothioate linkage
  modified_base 2: mod_base = OTHER; note = 2'-O-methyl modified nucleotide with phosphorothioate linkage
  modified_base 3: mod_base = OTHER; note = 2'-fluoro modified nucleotide
  modified_base 4: mod_base = OTHER; note = 2'-O-methyl modified nucleotide
  modified_base 5: mod_base = OTHER; note = 2'-fluoro modified nucleotide
  modified_base 6: mod_base = OTHER; note = 2'-O-methyl modified nucleotide
  modified_base 7: mod_base = OTHER; note = 2'-fluoro modified nucleotide
  modified_base 8: mod_base = OTHER; note = 2'-O-methyl modified nucleotide
  modified_base 9: mod_base = OTHER; note = 2'-fluoro modified nucleotide
  modified_base 10: mod_base = OTHER; note = 2'-O-methyl modified nucleotide
  modified_base 11: mod_base = OTHER; note = 2'-fluoro modified nucleotide
  modified_base 12: mod_base = OTHER; note = 2'-O-methyl modified nucleotide
  modified_base 13: mod_base = OTHER; note = 2'-fluoro modified nucleotide with phosphorothioate linkage
  modified_base 14: mod_base = OTHER; note = 2'-O-methyl modified nucleotide with phosphorothioate linkage
  misc_difference 15: note = 2'-fluoro modified nucleotide may be attached to trivalent N-Acetylgalactosamine
gctgaacaagctcta

SEQ ID NO: 910 - RNA, 15 nt, synthetic construct
  source 1..15: mol_type = other RNA
  modified_base 1: mod_base = OTHER; note = 2'-fluoro modified nucleotide with phosphorothioate linkage
  modified_base 2: mod_base = OTHER; note = 2'-O-methyl modified nucleotide with phosphorothioate linkage
  modified_base 3: mod_base = OTHER; note = 2'-fluoro modified nucleotide
  modified_base 4: mod_base = OTHER; note = 2'-O-methyl modified nucleotide
  modified_base 5: mod_base = OTHER; note = 2'-fluoro modified nucleotide
  modified_base 6: mod_base = OTHER; note = 2'-O-methyl modified nucleotide
  modified_base 7: mod_base = OTHER; note = 2'-fluoro modified nucleotide
  modified_base 8: mod_base = OTHER; note = 2'-O-methyl modified nucleotide
  modified_base 9: mod_base = OTHER; note = 2'-fluoro modified nucleotide
  modified_base 10: mod_base = OTHER; note = 2'-O-methyl modified nucleotide
  modified_base 11: mod_base = OTHER; note = 2'-fluoro modified nucleotide
  modified_base 12: mod_base = OTHER; note = 2'-O-methyl modified nucleotide
  modified_base 13: mod_base = OTHER; note = 2'-fluoro modified nucleotide with phosphorothioate linkage
  modified_base 14: mod_base = OTHER; note = 2'-O-methyl modified nucleotide with phosphorothioate linkage
  misc_difference 15: note = 2'-fluoro modified nucleotide may be attached to trivalent N-Acetylgalactosamine
tgccactatgtctaa

SEQ ID NO: 911 - RNA, 15 nt, synthetic construct
  source 1..15: mol_type = other RNA
  modified_base 1: mod_base = OTHER; note = 2'-fluoro modified nucleotide with phosphorothioate linkage
  modified_base 2: mod_base = OTHER; note = 2'-O-methyl modified nucleotide with phosphorothioate linkage
  modified_base 3: mod_base = OTHER; note = 2'-fluoro modified nucleotide
  modified_base 4: mod_base = OTHER; note = 2'-O-methyl modified nucleotide
  modified_base 5: mod_base = OTHER; note = 2'-fluoro modified nucleotide
  modified_base 6: mod_base = OTHER; note = 2'-O-methyl modified nucleotide
  modified_base 7: mod_base = OTHER; note = 2'-fluoro modified nucleotide
  modified_base 8: mod_base = OTHER; note = 2'-O-methyl modified nucleotide
  modified_base 9: mod_base = OTHER; note = 2'-fluoro modified nucleotide
  modified_base 10: mod_base = OTHER; note = 2'-O-methyl modified nucleotide
  modified_base 11: mod_base = OTHER; note = 2'-fluoro modified nucleotide
  modified_base 12: mod_base = OTHER; note = 2'-O-methyl modified nucleotide
  modified_base 13: mod_base = OTHER; note = 2'-fluoro modified nucleotide with phosphorothioate linkage
  modified_base 14: mod_base = OTHER; note = 2'-O-methyl modified nucleotide with phosphorothioate linkage
  misc_difference 15: note = 2'-fluoro modified nucleotide may be attached to trivalent N-Acetylgalactosamine
ctccaacaattacca

SEQ ID NO: 912 - RNA, 15 nt, synthetic construct
  source 1..15: mol_type = other RNA
  modified_base 1: mod_base = OTHER; note = 2'-fluoro modified nucleotide with phosphorothioate linkage
  modified_base 2: mod_base = OTHER; note = 2'-O-methyl modified nucleotide with phosphorothioate linkage
  modified_base 3: mod_base = OTHER; note = 2'-fluoro modified nucleotide
  modified_base 4: mod_base = OTHER; note = 2'-O-methyl modified nucleotide
  modified_base 5: mod_base = OTHER; note = 2'-fluoro modified nucleotide
  modified_base 6: mod_base = OTHER; note = 2'-O-methyl modified nucleotide
  modified_base 7: mod_base = OTHER; note = 2'-fluoro modified nucleotide
  modified_base 8: mod_base = OTHER; note = 2'-O-methyl modified nucleotide
  modified_base 9: mod_base = OTHER; note = 2'-fluoro modified nucleotide
  modified_base 10: mod_base = OTHER; note = 2'-O-methyl modified nucleotide
  modified_base 11: mod_base = OTHER; note = 2'-fluoro modified nucleotide
  modified_base 12: mod_base = OTHER; note = 2'-O-methyl modified nucleotide
  modified_base 13: mod_base = OTHER; note = 2'-fluoro modified nucleotide with phosphorothioate linkage
  modified_base 14: mod_base = OTHER; note = 2'-O-methyl modified nucleotide with phosphorothioate linkage
  misc_difference 15: note = 2'-fluoro modified nucleotide may be attached to trivalent N-Acetylgalactosamine
ccggaaggaatcaga

SEQ ID NO: 913 - RNA, 15 nt, synthetic construct
  source 1..15: mol_type = other RNA
  modified_base 1: mod_base = OTHER; note = 2'-fluoro modified nucleotide with phosphorothioate linkage
  modified_base 2: mod_base = OTHER; note = 2'-O-methyl modified nucleotide with phosphorothioate linkage
  modified_base 3: mod_base = OTHER; note = 2'-fluoro modified nucleotide
  modified_base 4: mod_base = OTHER; note = 2'-O-methyl modified nucleotide
  modified_base 5: mod_base = OTHER; note = 2'-fluoro modified nucleotide
  modified_base 6: mod_base = OTHER; note = 2'-O-methyl modified nucleotide
  modified_base 7: mod_base = OTHER; note = 2'-fluoro modified nucleotide
  modified_base 8: mod_base = OTHER; note = 2'-O-methyl modified nucleotide
  modified_base 9: mod_base = OTHER; note = 2'-fluoro modified nucleotide
  modified_base 10: mod_base = OTHER; note = 2'-O-methyl modified nucleotide
  modified_base 11: mod_base = OTHER; note = 2'-fluoro modified nucleotide
  modified_base 12: mod_base = OTHER; note = 2'-O-methyl modified nucleotide
  modified_base 13: mod_base = OTHER; note = 2'-fluoro modified nucleotide with phosphorothioate linkage
  modified_base 14: mod_base = OTHER; note = 2'-O-methyl modified nucleotide with phosphorothioate linkage
  misc_difference 15: note = 2'-fluoro modified nucleotide may be attached to trivalent N-Acetylgalactosamine
aaaatgagggtttca

SEQ ID NO: 914 - RNA, 15 nt, synthetic construct
  source 1..15: mol_type = other RNA
  modified_base 1: mod_base = OTHER; note = 2'-fluoro modified nucleotide with phosphorothioate linkage
  modified_base 2: mod_base = OTHER; note = 2'-O-methyl modified nucleotide with phosphorothioate linkage
  modified_base 3: mod_base = OTHER; note = 2'-fluoro modified nucleotide
  modified_base 4: mod_base = OTHER; note = 2'-O-methyl modified nucleotide
  modified_base 5: mod_base = OTHER; note = 2'-fluoro modified nucleotide
  modified_base 6: mod_base = OTHER; note = 2'-O-methyl modified nucleotide
  modified_base 7: mod_base = OTHER; note = 2'-fluoro modified nucleotide
  modified_base 8: mod_base = OTHER; note = 2'-O-methyl modified nucleotide
  modified_base 9: mod_base = OTHER; note = 2'-fluoro modified nucleotide
  modified_base 10: mod_base = OTHER; note = 2'-O-methyl modified nucleotide
  modified_base 11: mod_base = OTHER; note = 2'-fluoro modified nucleotide
  modified_base 12: mod_base = OTHER; note = 2'-O-methyl modified nucleotide
  modified_base 13: mod_base = OTHER; note = 2'-fluoro modified nucleotide with phosphorothioate linkage
  modified_base 14: mod_base = OTHER; note = 2'-O-methyl modified nucleotide with phosphorothioate linkage
  misc_difference 15: note = 2'-fluoro modified nucleotide may be attached to trivalent N-Acetylgalactosamine
aagaacactatgata

SEQ ID NO: 915 - RNA, 15 nt, synthetic construct
  source 1..15: mol_type = other RNA
  modified_base 1: mod_base = OTHER; note = 2'-fluoro modified nucleotide with phosphorothioate linkage
  modified_base 2: mod_base = OTHER; note = 2'-O-methyl modified nucleotide with phosphorothioate linkage
  modified_base 3: mod_base = OTHER; note = 2'-fluoro modified nucleotide
  modified_base 4: mod_base = OTHER; note = 2'-O-methyl modified nucleotide
  modified_base 5: mod_base = OTHER; note = 2'-fluoro modified nucleotide
  modified_base 6: mod_base = OTHER; note = 2'-O-methyl modified nucleotide
  modified_base 7: mod_base = OTHER; note = 2'-fluoro modified nucleotide
  modified_base 8: mod_base = OTHER; note = 2'-O-methyl modified nucleotide
  modified_base 9: mod_base = OTHER; note = 2'-fluoro modified nucleotide
  modified_base 10: mod_base = OTHER; note = 2'-O-methyl modified nucleotide
  modified_base 11: mod_base = OTHER; note = 2'-fluoro modified nucleotide
  modified_base 12: mod_base = OTHER; note = 2'-O-methyl modified nucleotide
  modified_base 13: mod_base = OTHER; note = 2'-fluoro modified nucleotide with phosphorothioate linkage
  modified_base 14: mod_base = OTHER; note = 2'-O-methyl modified nucleotide with phosphorothioate linkage
  misc_difference 15: note = 2'-fluoro modified nucleotide may be attached to trivalent N-Acetylgalactosamine
cataaaaccagcaca

SEQ ID NO: 916 - RNA, 15 nt, synthetic construct
  source 1..15: mol_type = other RNA
  modified_base 1: mod_base = OTHER; note = 2'-fluoro modified nucleotide with phosphorothioate linkage
  modified_base 2: mod_base = OTHER; note = 2'-O-methyl modified nucleotide with phosphorothioate linkage
  modified_base 3: mod_base = OTHER; note = 2'-fluoro modified nucleotide
  modified_base 4: mod_base = OTHER; note = 2'-O-methyl modified nucleotide
  modified_base 5: mod_base = OTHER; note = 2'-fluoro modified nucleotide
  modified_base 6: mod_base = OTHER; note = 2'-O-methyl modified nucleotide
  modified_base 7: mod_base = OTHER; note = 2'-fluoro modified nucleotide
  modified_base 8: mod_base = OTHER; note = 2'-O-methyl modified nucleotide
  modified_base 9: mod_base = OTHER; note = 2'-fluoro modified nucleotide
  modified_base 10: mod_base = OTHER; note = 2'-O-methyl modified nucleotide
  modified_base 11: mod_base = OTHER; note = 2'-fluoro modified nucleotide
  modified_base 12: mod_base = OTHER; note = 2'-O-methyl modified nucleotide
  modified_base 13: mod_base = OTHER; note = 2'-fluoro modified nucleotide with phosphorothioate linkage
  modified_base 14: mod_base = OTHER; note = 2'-O-methyl modified nucleotide with phosphorothioate linkage
  misc_difference 15: note = 2'-fluoro modified nucleotide may be attached to trivalent N-Acetylgalactosamine
caggaatgcccttta

SEQ ID NO: 917 - RNA, 15 nt, synthetic construct
  source 1..15: mol_type = other RNA
  modified_base 1: mod_base = OTHER; note = 2'-fluoro modified nucleotide with phosphorothioate linkage
  modified_base 2: mod_base = OTHER; note = 2'-O-methyl modified nucleotide with phosphorothioate linkage
  modified_base 3: mod_base = OTHER; note = 2'-fluoro modified nucleotide
  modified_base 4: mod_base = OTHER; note = 2'-O-methyl modified nucleotide
  modified_base 5: mod_base = OTHER; note = 2'-fluoro modified nucleotide
  modified_base 6: mod_base = OTHER; note = 2'-O-methyl modified nucleotide
  modified_base 7: mod_base = OTHER; note = 2'-fluoro modified nucleotide
  modified_base 8: mod_base = OTHER; note = 2'-O-methyl modified nucleotide
  modified_base 9: mod_base = OTHER; note = 2'-fluoro modified nucleotide
  modified_base 10: mod_base = OTHER; note = 2'-O-methyl modified nucleotide
  modified_base 11: mod_base = OTHER; note = 2'-fluoro modified nucleotide
  modified_base 12: mod_base = OTHER; note = 2'-O-methyl modified nucleotide
  modified_base 13: mod_base = OTHER; note = 2'-fluoro modified nucleotide with phosphorothioate linkage
  modified_base 14: mod_base = OTHER; note = 2'-O-methyl modified nucleotide with phosphorothioate linkage
  misc_difference 15: note = 2'-fluoro modified nucleotide may be attached to trivalent N-Acetylgalactosamine
caggagtaacctgga

SEQ ID NO: 918 - RNA, 15 nt, synthetic construct
  source 1..15: mol_type = other RNA
  modified_base 1: mod_base = OTHER; note = 2'-fluoro modified nucleotide with phosphorothioate linkage
  modified_base 2: mod_base = OTHER; note = 2'-O-methyl modified nucleotide with phosphorothioate linkage
  modified_base 3: mod_base = OTHER; note = 2'-fluoro modified nucleotide
  modified_base 4: mod_base = OTHER; note = 2'-O-methyl modified nucleotide
  modified_base 5: mod_base = OTHER; note = 2'-fluoro modified nucleotide
  modified_base 6: mod_base = OTHER; note = 2'-O-methyl modified nucleotide
  modified_base 7: mod_base = OTHER; note = 2'-fluoro modified nucleotide
  modified_base 8: mod_base = OTHER; note = 2'-O-methyl modified nucleotide
  modified_base 9: mod_base = OTHER; note = 2'-fluoro modified nucleotide
  modified_base 10: mod_base = OTHER; note = 2'-O-methyl modified nucleotide
  modified_base 11: mod_base = OTHER; note = 2'-fluoro modified nucleotide
  modified_base 12: mod_base = OTHER; note = 2'-O-methyl modified nucleotide
  modified_base 13: mod_base = OTHER; note = 2'-fluoro modified nucleotide with phosphorothioate linkage
  modified_base 14: mod_base = OTHER; note = 2'-O-methyl modified nucleotide with phosphorothioate linkage
  misc_difference 15: note = 2'-fluoro modified nucleotide may be attached to trivalent N-Acetylgalactosamine
cagctaaaagactta

SEQ ID NO: 919 - RNA, 15 nt, synthetic construct
  source 1..15: mol_type = other RNA
  modified_base 1: mod_base = OTHER; note = 2'-fluoro modified nucleotide with phosphorothioate linkage
  modified_base 2: mod_base = OTHER; note = 2'-O-methyl modified nucleotide with phosphorothioate linkage
  modified_base 3: mod_base = OTHER; note = 2'-fluoro modified nucleotide
  modified_base 4: mod_base = OTHER; note = 2'-O-methyl modified nucleotide
  modified_base 5: mod_base = OTHER; note = 2'-fluoro modified nucleotide
  modified_base 6: mod_base = OTHER; note = 2'-O-methyl modified nucleotide
  modified_base 7: mod_base = OTHER; note = 2'-fluoro modified nucleotide
  modified_base 8: mod_base = OTHER; note = 2'-O-methyl modified nucleotide
  modified_base 9: mod_base = OTHER; note = 2'-fluoro modified nucleotide
  modified_base 10: mod_base = OTHER; note = 2'-O-methyl modified nucleotide
  modified_base 11: mod_base = OTHER; note = 2'-fluoro modified nucleotide
  modified_base 12: mod_base = OTHER; note = 2'-O-methyl modified nucleotide
  modified_base 13: mod_base = OTHER; note = 2'-fluoro modified nucleotide with phosphorothioate linkage
  modified_base 14: mod_base = OTHER; note = 2'-O-methyl modified nucleotide with phosphorothioate linkage
  misc_difference 15: note = 2'-fluoro modified nucleotide may be attached to trivalent N-Acetylgalactosamine
cttcagacaacccaa

SEQ ID NO: 920 - RNA, 15 nt, synthetic construct
  source 1..15: mol_type = other RNA
  modified_base 1: mod_base = OTHER; note = 2'-fluoro modified nucleotide with phosphorothioate linkage
  modified_base 2: mod_base = OTHER; note = 2'-O-methyl modified nucleotide with phosphorothioate linkage
  modified_base 3: mod_base = OTHER; note = 2'-fluoro modified nucleotide
  modified_base 4: mod_base = OTHER; note = 2'-O-methyl modified nucleotide
  modified_base 5: mod_base = OTHER; note = 2'-fluoro modified nucleotide
  modified_base 6: mod_base = OTHER; note = 2'-O-methyl modified nucleotide
  modified_base 7: mod_base = OTHER; note = 2'-fluoro modified nucleotide
  modified_base 8: mod_base = OTHER; note = 2'-O-methyl modified nucleotide
  modified_base 9: mod_base = OTHER; note = 2'-fluoro modified nucleotide
  modified_base 10: mod_base = OTHER; note = 2'-O-methyl modified nucleotide
  modified_base 11: mod_base = OTHER; note = 2'-fluoro modified nucleotide
  modified_base 12: mod_base = OTHER; note = 2'-O-methyl modified nucleotide
  modified_base 13: mod_base = OTHER; note = 2'-fluoro modified nucleotide with phosphorothioate linkage
  modified_base 14: mod_base = OTHER; note = 2'-O-methyl modified nucleotide with phosphorothioate linkage
  misc_difference 15: note = 2'-fluoro modified nucleotide may be attached to trivalent N-Acetylgalactosamine
caagtatgagctgga

SEQ ID NO: 921 - RNA, 15 nt, synthetic construct
  source 1..15: mol_type = other RNA
  modified_base 1: mod_base = OTHER; note = 2'-fluoro modified nucleotide with phosphorothioate linkage
  modified_base 2: mod_base = OTHER; note = 2'-O-methyl modified nucleotide with phosphorothioate linkage
  modified_base 3: mod_base = OTHER; note = 2'-fluoro modified nucleotide
  modified_base 4: mod_base = OTHER; note = 2'-O-methyl modified nucleotide
  modified_base 5: mod_base = OTHER; note = 2'-fluoro modified nucleotide
  modified_base 6: mod_base = OTHER; note = 2'-O-methyl modified nucleotide
  modified_base 7: mod_base = OTHER; note = 2'-fluoro modified nucleotide
  modified_base 8: mod_base = OTHER; note = 2'-O-methyl modified nucleotide
  modified_base 9: mod_base = OTHER; note = 2'-fluoro modified nucleotide
  modified_base 10: mod_base = OTHER; note = 2'-O-methyl modified nucleotide
  modified_base 11: mod_base = OTHER; note = 2'-fluoro modified nucleotide
  modified_base 12: mod_base = OTHER; note = 2'-O-methyl modified nucleotide
  modified_base 13: mod_base = OTHER; note = 2'-fluoro modified nucleotide with phosphorothioate linkage
  modified_base 14: mod_base = OTHER; note = 2'-O-methyl modified nucleotide with phosphorothioate linkage
  misc_difference 15: note = 2'-fluoro modified nucleotide may be attached to trivalent N-Acetylgalactosamine
taatgcaggacttca

SEQ ID NO: 922 - RNA, 15 nt, synthetic construct
  source 1..15: mol_type = other RNA
  modified_base 1: mod_base = OTHER; note = 2'-fluoro modified nucleotide with phosphorothioate linkage
  modified_base 2: mod_base = OTHER; note = 2'-O-methyl modified nucleotide with phosphorothioate linkage
  modified_base 3: mod_base = OTHER; note = 2'-fluoro modified nucleotide
  modified_base 4: mod_base = OTHER; note = 2'-O-methyl modified nucleotide
  modified_base 5: mod_base = OTHER; note = 2'-fluoro modified nucleotide
  modified_base 6: mod_base = OTHER; note = 2'-O-methyl modified nucleotide
  modified_base 7: mod_base = OTHER; note = 2'-fluoro modified nucleotide
  modified_base 8: mod_base = OTHER; note = 2'-O-methyl modified nucleotide
  modified_base 9: mod_base = OTHER; note = 2'-fluoro modified nucleotide
  modified_base 10: mod_base = OTHER; note = 2'-O-methyl modified nucleotide
  modified_base 11: mod_base = OTHER; note = 2'-fluoro modified nucleotide
  modified_base 12: mod_base = OTHER; note = 2'-O-methyl modified nucleotide
  modified_base 13: mod_base = OTHER; note = 2'-fluoro modified nucleotide with phosphorothioate linkage
  modified_base 14: mod_base = OTHER; note = 2'-O-methyl modified nucleotide with phosphorothioate linkage
  misc_difference 15: note = 2'-fluoro modified nucleotide may be attached to trivalent N-Acetylgalactosamine
cagagtaagatctga

SEQ ID NO: 923 - RNA, 15 nt, synthetic construct
  source 1..15: mol_type = other RNA
  modified_base 1: mod_base = OTHER; note = 2'-fluoro modified nucleotide with phosphorothioate linkage
  modified_base 2: mod_base = OTHER; note = 2'-O-methyl modified nucleotide with phosphorothioate linkage
  modified_base 3: mod_base = OTHER; note = 2'-fluoro modified nucleotide
  modified_base 4: mod_base = OTHER; note = 2'-O-methyl modified nucleotide
  modified_base 5: mod_base = OTHER; note = 2'-fluoro modified nucleotide
  modified_base 6: mod_base = OTHER; note = 2'-O-methyl modified nucleotide
  modified_base 7: mod_base = OTHER; note = 2'-fluoro modified nucleotide
  modified_base 8: mod_base = OTHER; note = 2'-O-methyl modified nucleotide
  modified_base 9: mod_base = OTHER; note = 2'-fluoro modified nucleotide
  modified_base 10: mod_base = OTHER; note = 2'-O-methyl modified nucleotide
  modified_base 11: mod_base = OTHER; note = 2'-fluoro modified nucleotide
  modified_base 12: mod_base = OTHER; note = 2'-O-methyl modified nucleotide
  modified_base 13: mod_base = OTHER; note = 2'-fluoro modified nucleotide with phosphorothioate linkage
  modified_base 14: mod_base = OTHER; note = 2'-O-methyl modified nucleotide with phosphorothioate linkage
  misc_difference 15: note = 2'-fluoro modified nucleotide may be attached to trivalent N-Acetylgalactosamine
agaagcagaagccca

SEQ ID NO: 924 - RNA, 15 nt, synthetic construct
  source 1..15: mol_type = other RNA
  modified_base 1: mod_base = OTHER; note = 2'-fluoro modified nucleotide with phosphorothioate linkage
  modified_base 2: mod_base = OTHER; note = 2'-O-methyl modified nucleotide with phosphorothioate linkage
  modified_base 3: mod_base = OTHER; note = 2'-fluoro modified nucleotide
  modified_base 4: mod_base = OTHER; note = 2'-O-methyl modified nucleotide
  modified_base 5: mod_base = OTHER; note = 2'-fluoro modified nucleotide
  modified_base 6: mod_base = OTHER; note = 2'-O-methyl modified nucleotide
  modified_base 7: mod_base = OTHER; note = 2'-fluoro modified nucleotide
  modified_base 8: mod_base = OTHER; note = 2'-O-methyl modified nucleotide
  modified_base 9: mod_base = OTHER; note = 2'-fluoro modified nucleotide
  modified_base 10: mod_base = OTHER; note = 2'-O-methyl modified nucleotide
  modified_base 11: mod_base = OTHER; note = 2'-fluoro modified nucleotide
  modified_base 12: mod_base = OTHER; note = 2'-O-methyl modified nucleotide
  modified_base 13: mod_base = OTHER; note = 2'-fluoro modified nucleotide with phosphorothioate linkage
  modified_base 14: mod_base = OTHER; note = 2'-O-methyl modified nucleotide with phosphorothioate linkage
  misc_difference 15: note = 2'-fluoro modified nucleotide may be attached to trivalent N-Acetylgalactosamine
caccataaaaccaga

SEQ ID NO: 925 - RNA, 15 nt, synthetic construct
  source 1..15: mol_type = other RNA
  modified_base 1: mod_base = OTHER; note = 2'-fluoro modified nucleotide with phosphorothioate linkage
  modified_base 2: mod_base = OTHER; note = 2'-O-methyl modified nucleotide with phosphorothioate linkage
  modified_base 3: mod_base = OTHER; note = 2'-fluoro modified nucleotide
  modified_base 4: mod_base = OTHER; note = 2'-O-methyl modified nucleotide
  modified_base 5: mod_base = OTHER; note = 2'-fluoro modified nucleotide
  modified_base 6: mod_base = OTHER; note = 2'-O-methyl modified nucleotide
  modified_base 7: mod_base = OTHER; note = 2'-fluoro modified nucleotide
  modified_base 8: mod_base = OTHER; note = 2'-O-methyl modified nucleotide
  modified_base 9: mod_base = OTHER; note = 2'-fluoro modified nucleotide
  modified_base 10: mod_base = OTHER; note = 2'-O-methyl modified nucleotide
  modified_base 11: mod_base = OTHER; note = 2'-fluoro modified nucleotide
  modified_base 12: mod_base = OTHER; note = 2'-O-methyl modified nucleotide
  modified_base 13: mod_base = OTHER; note = 2'-fluoro modified nucleotide with phosphorothioate linkage
  modified_base 14: mod_base = OTHER; note = 2'-O-methyl modified nucleotide with phosphorothioate linkage
  misc_difference 15: note = 2'-fluoro modified nucleotide may be attached to trivalent N-Acetylgalactosamine
tgtctttgggtgcca

SEQ ID NO: 926 - RNA, 15 nt, synthetic construct
  source 1..15: mol_type = other RNA
  modified_base 1: mod_base = OTHER; note = 2'-fluoro modified nucleotide with phosphorothioate linkage
  modified_base 2: mod_base = OTHER; note = 2'-O-methyl modified nucleotide with phosphorothioate linkage
  modified_base 3: mod_base = OTHER; note = 2'-fluoro modified nucleotide
  modified_base 4: mod_base = OTHER; note = 2'-O-methyl modified nucleotide
  modified_base 5: mod_base = OTHER; note = 2'-fluoro modified nucleotide
  modified_base 6: mod_base = OTHER; note = 2'-O-methyl modified nucleotide
  modified_base 7: mod_base = OTHER; note = 2'-fluoro modified nucleotide
  modified_base 8: mod_base = OTHER; note = 2'-O-methyl modified nucleotide
  modified_base 9: mod_base = OTHER; note = 2'-fluoro modified nucleotide
  modified_base 10: mod_base = OTHER; note = 2'-O-methyl modified nucleotide
  modified_base 11: mod_base = OTHER; note = 2'-fluoro modified nucleotide
  modified_base 12: mod_base = OTHER; note = 2'-O-methyl modified nucleotide
  modified_base 13: mod_base = OTHER; note = 2'-fluoro modified nucleotide with phosphorothioate linkage
  modified_base 14: mod_base = OTHER; note = 2'-O-methyl modified nucleotide with phosphorothioate linkage
  misc_difference 15: note = 2'-fluoro modified nucleotide may be attached to trivalent N-Acetylgalactosamine
cagaaccaagagcta

SEQ ID NO: 927 - RNA, 15 nt, synthetic construct
  source 1..15: mol_type = other RNA
  modified_base 1: mod_base = OTHER; note = 2'-fluoro modified nucleotide with phosphorothioate linkage
  modified_base 2: mod_base = OTHER; note = 2'-O-methyl modified nucleotide with phosphorothioate linkage
  modified_base 3: mod_base = OTHER; note = 2'-fluoro modified nucleotide
  modified_base 4: mod_base = OTHER; note = 2'-O-methyl modified nucleotide
  modified_base 5: mod_base = OTHER; note = 2'-fluoro modified nucleotide
  modified_base 6: mod_base = OTHER; note = 2'-O-methyl modified nucleotide
  modified_base 7: mod_base = OTHER; note = 2'-fluoro modified nucleotide
  modified_base 8: mod_base = OTHER; note = 2'-O-methyl modified nucleotide
  modified_base 9: mod_base = OTHER; note = 2'-fluoro modified nucleotide
  modified_base 10: mod_base = OTHER; note = 2'-O-methyl modified nucleotide
  modified_base 11: mod_base = OTHER; note = 2'-fluoro modified nucleotide
  modified_base 12: mod_base = OTHER; note = 2'-O-methyl modified nucleotide
  modified_base 13: mod_base = OTHER; note = 2'-fluoro modified nucleotide with phosphorothioate linkage
  modified_base 14: mod_base = OTHER; note = 2'-O-methyl modified nucleotide with phosphorothioate linkage
  misc_difference 15: note = 2'-fluoro modified nucleotide may be attached to trivalent N-Acetylgalactosamine
caacgtcaacttcca

SEQ ID NO: 928 - RNA, 15 nt, synthetic construct
  source 1..15: mol_type = other RNA
  modified_base 1: mod_base = OTHER; note = 2'-fluoro modified nucleotide with phosphorothioate linkage
  modified_base 2: mod_base = OTHER; note = 2'-O-methyl modified nucleotide with phosphorothioate linkage
  modified_base 3: mod_base = OTHER; note = 2'-fluoro modified nucleotide
  modified_base 4: mod_base = OTHER; note = 2'-O-methyl modified nucleotide
  modified_base 5: mod_base = OTHER; note = 2'-fluoro modified nucleotide
  modified_base 6: mod_base = OTHER; note = 2'-O-methyl modified nucleotide
  modified_base 7: mod_base = OTHER; note = 2'-fluoro modified nucleotide
  modified_base 8: mod_base = OTHER; note = 2'-O-methyl modified nucleotide
  modified_base 9: mod_base = OTHER; note = 2'-fluoro modified nucleotide
  modified_base 10: mod_base = OTHER; note = 2'-O-methyl modified nucleotide
  modified_base 11: mod_base = OTHER; note = 2'-fluoro modified nucleotide
  modified_base 12: mod_base = OTHER; note = 2'-O-methyl modified nucleotide
  modified_base 13: mod_base = OTHER; note = 2'-fluoro modified nucleotide with phosphorothioate linkage
  modified_base 14: mod_base = OTHER; note = 2'-O-methyl modified nucleotide with phosphorothioate linkage
  misc_difference 15: note = 2'-fluoro modified nucleotide may be attached to trivalent N-Acetylgalactosamine
caacccagctctgca

SEQ ID NO: 929 - RNA, 15 nt, synthetic construct
  source 1..15: mol_type = other RNA
  modified_base 1: mod_base = OTHER; note = 2'-fluoro modified nucleotide with phosphorothioate linkage
  modified_base 2: mod_base = OTHER; note = 2'-O-methyl modified nucleotide with phosphorothioate linkage
  modified_base 3: mod_base = OTHER; note = 2'-fluoro modified nucleotide
  modified_base 4: mod_base = OTHER; note = 2'-O-methyl modified nucleotide
  modified_base 5: mod_base = OTHER; note = 2'-fluoro modified nucleotide
  modified_base 6: mod_base = OTHER; note = 2'-O-methyl modified nucleotide
  modified_base 7: mod_base = OTHER; note = 2'-fluoro modified nucleotide
  modified_base 8: mod_base = OTHER; note = 2'-O-methyl modified nucleotide
  modified_base 9: mod_base = OTHER; note = 2'-fluoro modified nucleotide
  modified_base 10: mod_base = OTHER; note = 2'-O-methyl modified nucleotide
  modified_base 11: mod_base = OTHER; note = 2'-fluoro modified nucleotide
  modified_base 12: mod_base = OTHER; note = 2'-O-methyl modified nucleotide
  modified_base 13: mod_base = OTHER; note = 2'-fluoro modified nucleotide with phosphorothioate linkage
  modified_base 14: mod_base = OTHER; note = 2'-O-methyl modified nucleotide with phosphorothioate linkage
  misc_difference 15: note = 2'-fluoro modified nucleotide may be attached to trivalent N-Acetylgalactosamine
caggagtggactata

SEQ ID NO: 930 - RNA, 15 nt, synthetic construct
  source 1..15: mol_type = other RNA
  modified_base 1: mod_base = OTHER; note = 2'-fluoro modified nucleotide with phosphorothioate linkage
  modified_base 2: mod_base = OTHER; note = 2'-O-methyl modified nucleotide with phosphorothioate linkage
  modified_base 3: mod_base = OTHER; note = 2'-fluoro modified nucleotide
  modified_base 4: mod_base = OTHER; note = 2'-O-methyl modified nucleotide
  modified_base 5: mod_base = OTHER; note = 2'-fluoro modified nucleotide
  modified_base 6: mod_base = OTHER; note = 2'-O-methyl modified nucleotide
  modified_base 7: mod_base = OTHER; note = 2'-fluoro modified nucleotide
  modified_base 8: mod_base = OTHER; note = 2'-O-methyl modified nucleotide
  modified_base 9: mod_base = OTHER; note = 2'-fluoro modified nucleotide
  modified_base 10: mod_base = OTHER; note = 2'-O-methyl modified nucleotide
  modified_base 11: mod_base = OTHER; note = 2'-fluoro modified nucleotide
  modified_base 12: mod_base = OTHER; note = 2'-O-methyl modified nucleotide
  modified_base 13: mod_base = OTHER; note = 2'-fluoro modified nucleotide with phosphorothioate linkage
  modified_base 14: mod_base = OTHER; note = 2'-O-methyl modified nucleotide with phosphorothioate linkage
  misc_difference 15: note = 2'-fluoro modified nucleotide may be attached to trivalent N-Acetylgalactosamine
tgtaataaattcgaa

SEQ ID NO: 931 - RNA, 15 nt, synthetic construct
  source 1..15: mol_type = other RNA
  modified_base 1: mod_base = OTHER; note = 2'-fluoro modified nucleotide with phosphorothioate linkage
  modified_base 2: mod_base = OTHER; note = 2'-O-methyl modified nucleotide with phosphorothioate linkage
  modified_base 3: mod_base = OTHER; note = 2'-fluoro modified nucleotide
  modified_base 4: mod_base = OTHER; note = 2'-O-methyl modified nucleotide
  modified_base 5: mod_base = OTHER; note = 2'-fluoro modified nucleotide
  modified_base 6: mod_base = OTHER; note = 2'-O-methyl modified nucleotide
  modified_base 7: mod_base = OTHER; note = 2'-fluoro modified nucleotide
  modified_base 8: mod_base = OTHER; note = 2'-O-methyl modified nucleotide
  modified_base 9: mod_base = OTHER; note = 2'-fluoro modified nucleotide
  modified_base 10: mod_base = OTHER; note = 2'-O-methyl modified nucleotide
  modified_base 11: mod_base = OTHER; note = 2'-fluoro modified nucleotide
  modified_base 12: mod_base = OTHER; note = 2'-O-methyl modified nucleotide
  modified_base 13: mod_base = OTHER; note = 2'-fluoro modified nucleotide with phosphorothioate linkage
  modified_base 14: mod_base = OTHER; note = 2'-O-methyl modified nucleotide with phosphorothioate linkage
  misc_difference 15: note = 2'-fluoro modified nucleotide may be attached to trivalent N-Acetylgalactosamine
tacagagaaattcta

SEQ ID NO: 932 - RNA, 15 nt, synthetic construct
  source 1..15: mol_type = other RNA
  modified_base 1: mod_base = OTHER; note = 2'-fluoro modified nucleotide with phosphorothioate linkage
  modified_base 2: mod_base = OTHER; note = 2'-O-methyl modified nucleotide with phosphorothioate linkage
  modified_base 3: mod_base = OTHER; note = 2'-fluoro modified nucleotide
  modified_base 4: mod_base = OTHER; note = 2'-O-methyl modified nucleotide
  modified_base 5: mod_base = OTHER; note = 2'-fluoro modified nucleotide
  modified_base 6: mod_base = OTHER; note = 2'-O-methyl modified nucleotide
  modified_base 7: mod_base = OTHER; note = 2'-fluoro modified nucleotide
  modified_base 8: mod_base = OTHER; note = 2'-O-methyl modified nucleotide
  modified_base 9: mod_base = OTHER; note = 2'-fluoro modified nucleotide
  modified_base 10: mod_base = OTHER; note = 2'-O-methyl modified nucleotide
  modified_base 11: mod_base = OTHER; note = 2'-fluoro modified nucleotide
  modified_base 12: mod_base = OTHER; note = 2'-O-methyl modified nucleotide
  modified_base 13: mod_base = OTHER; note = 2'-fluoro modified nucleotide with phosphorothioate linkage
  modified_base 14: mod_base = OTHER; note = 2'-O-methyl modified nucleotide with phosphorothioate linkage
  misc_difference 15: note = 2'-fluoro modified nucleotide may be attached to trivalent N-Acetylgalactosamine
atgccaagaacacta

SEQ ID NO: 933 - RNA, 15 nt, synthetic construct
  source 1..15: mol_type = other RNA
  modified_base 1: mod_base = OTHER; note = 2'-fluoro modified nucleotide with phosphorothioate linkage
  modified_base 2: mod_base = OTHER; note = 2'-O-methyl modified nucleotide with phosphorothioate linkage
  modified_base 3: mod_base = OTHER; note = 2'-fluoro modified nucleotide
  modified_base 4: mod_base = OTHER; note = 2'-O-methyl modified nucleotide
  modified_base 5: mod_base = OTHER; note = 2'-fluoro modified nucleotide
  modified_base 6: mod_base = OTHER; note = 2'-O-methyl modified nucleotide
  modified_base 7: mod_base = OTHER; note = 2'-fluoro modified nucleotide
  modified_base 8: mod_base = OTHER; note = 2'-O-methyl modified nucleotide
  modified_base 9: mod_base = OTHER; note = 2'-fluoro modified nucleotide
  modified_base 10: mod_base = OTHER; note = 2'-O-methyl modified nucleotide
  modified_base 11: mod_base = OTHER; note = 2'-fluoro modified nucleotide
  modified_base 12: mod_base = OTHER; note = 2'-O-methyl modified nucleotide
  modified_base 13: mod_base = OTHER; note = 2'-fluoro modified nucleotide with phosphorothioate linkage
  modified_base 14: mod_base = OTHER; note = 2'-O-methyl modified nucleotide with phosphorothioate linkage
  misc_difference 15: note = 2'-fluoro modified nucleotide may be attached to trivalent N-Acetylgalactosamine
gagaacatcgtttca

SEQ ID NO: 934 - RNA, 15 nt, synthetic construct
  source 1..15: mol_type = other RNA
  modified_base 1: mod_base = OTHER; note = 2'-fluoro modified nucleotide with phosphorothioate linkage
  modified_base 2: mod_base = OTHER; note = 2'-O-methyl modified nucleotide with phosphorothioate linkage
  modified_base 3: mod_base = OTHER; note = 2'-fluoro modified nucleotide
  modified_base 4: mod_base = OTHER; note = 2'-O-methyl modified nucleotide
  modified_base 5: mod_base = OTHER; note = 2'-fluoro modified nucleotide
  modified_base 6: mod_base = OTHER; note = 2'-O-methyl modified nucleotide
  modified_base 7: mod_base = OTHER; note = 2'-fluoro modified nucleotide
  modified_base 8: mod_base = OTHER; note = 2'-O-methyl modified nucleotide
  modified_base 9: mod_base = OTHER; note = 2'-fluoro modified nucleotide
  modified_base 10: mod_base = OTHER; note = 2'-O-methyl modified nucleotide
  modified_base 11: mod_base = OTHER; note = 2'-fluoro modified nucleotide
  modified_base 12: mod_base = OTHER; note = 2'-O-methyl modified nucleotide
  modified_base 13: mod_base = OTHER; note = 2'-fluoro modified nucleotide with phosphorothioate linkage
  modified_base 14: mod_base = OTHER; note = 2'-O-methyl modified nucleotide with phosphorothioate linkage
  misc_difference 15: note = 2'-fluoro modified nucleotide may be attached to trivalent N-Acetylgalactosamine
gatccgagcctacta

SEQ ID NO: 935 - RNA, 15 nt, synthetic construct
  source 1..15: mol_type = other RNA
  modified_base 1: mod_base = OTHER; note = 2'-fluoro modified nucleotide with phosphorothioate linkage
  modified_base 2: mod_base = OTHER; note = 2'-O-methyl modified nucleotide with phosphorothioate linkage
  modified_base 3: mod_base = OTHER; note = 2'-fluoro modified nucleotide
  modified_base 4: mod_base = OTHER; note = 2'-O-methyl modified nucleotide
  modified_base 5: mod_base = OTHER; note = 2'-fluoro modified nucleotide
  modified_base 6: mod_base = OTHER; note = 2'-O-methyl modified nucleotide
  modified_base 7: mod_base = OTHER; note = 2'-fluoro modified nucleotide
  modified_base 8: mod_base = OTHER; note = 2'-O-methyl modified nucleotide
  modified_base 9: mod_base = OTHER; note = 2'-fluoro modified nucleotide
  modified_base 10: mod_base = OTHER; note = 2'-O-methyl modified nucleotide
  modified_base 11: mod_base = OTHER; note = 2'-fluoro modified nucleotide
  modified_base 12: mod_base = OTHER; note = 2'-O-methyl modified nucleotide
  modified_base 13: mod_base = OTHER; note = 2'-fluoro modified nucleotide with phosphorothioate linkage
  modified_base 14: mod_base = OTHER; note = 2'-O-methyl modified nucleotide with phosphorothioate linkage
  misc_difference 15: note = 2'-fluoro modified nucleotide may be attached to trivalent N-Acetylgalactosamine
ctgtgctgaggagaa

SEQ ID NO: 936 - RNA, 15 nt, synthetic construct
  source 1..15: mol_type = other RNA
  modified_base 1: mod_base = OTHER; note = 2'-fluoro modified nucleotide with phosphorothioate linkage
  modified_base 2: mod_base = OTHER; note = 2'-O-methyl modified nucleotide with phosphorothioate linkage
  modified_base 3: mod_base = OTHER; note = 2'-fluoro modified nucleotide
  modified_base 4: mod_base = OTHER; note = 2'-O-methyl modified nucleotide
  modified_base 5: mod_base = OTHER; note = 2'-fluoro modified nucleotide
  modified_base 6: mod_base = OTHER; note = 2'-O-methyl modified nucleotide
  modified_base 7: mod_base = OTHER; note = 2'-fluoro modified nucleotide
  modified_base 8: mod_base = OTHER; note = 2'-O-methyl modified nucleotide
  modified_base 9: mod_base = OTHER; note = 2'-fluoro modified nucleotide
  modified_base 10: mod_base = OTHER; note = 2'-O-methyl modified nucleotide
  modified_base 11: mod_base = OTHER; note = 2'-fluoro modified nucleotide
  modified_base 12: mod_base = OTHER; note = 2'-O-methyl modified nucleotide
  modified_base 13: mod_base = OTHER; note = 2'-fluoro modified nucleotide with phosphorothioate linkage
  modified_base 14: mod_base = OTHER; note = 2'-O-methyl modified nucleotide with phosphorothioate linkage
  misc_difference 15: note = 2'-fluoro modified nucleotide may be attached to trivalent N-Acetylgalactosamine
catcacggtgcgcaa

SEQ ID NO: 937 - RNA, 15 nt, synthetic construct
  source 1..15: mol_type = other RNA
  modified_base 1: mod_base = OTHER; note = 2'-fluoro modified nucleotide with phosphorothioate linkage
  modified_base 2: mod_base = OTHER; note = 2'-O-methyl modified nucleotide with phosphorothioate linkage
  modified_base 3: mod_base = OTHER; note = 2'-fluoro modified nucleotide
  modified_base 4: mod_base = OTHER; note = 2'-O-methyl modified nucleotide
  modified_base 5: mod_base = OTHER; note = 2'-fluoro modified nucleotide
  modified_base 6: mod_base = OTHER; note = 2'-O-methyl modified nucleotide
  modified_base 7: mod_base = OTHER; note = 2'-fluoro modified nucleotide
  modified_base 8: mod_base = OTHER; note = 2'-O-methyl modified nucleotide
  modified_base 9: mod_base = OTHER; note = 2'-fluoro modified nucleotide
  modified_base 10: mod_base = OTHER; note = 2'-O-methyl modified nucleotide
  modified_base 11: mod_base = OTHER; note = 2'-fluoro modified nucleotide
  modified_base 12: mod_base = OTHER; note = 2'-O-methyl modified nucleotide
  modified_base 13: mod_base = OTHER; note = 2'-fluoro modified nucleotide with phosphorothioate linkage
  modified_base 14: mod_base = OTHER; note = 2'-O-methyl modified nucleotide with phosphorothioate linkage
  misc_difference 15: note = 2'-fluoro modified nucleotide may be attached to trivalent N-Acetylgalactosamine
ctttgacgagtacaa

SEQ ID NO: 938 - RNA, 15 nt, synthetic construct
  source 1..15: mol_type = other RNA
  modified_base 1: mod_base = OTHER; note = 2'-fluoro modified nucleotide with phosphorothioate linkage
  modified_base 2: mod_base = OTHER; note = 2'-O-methyl modified nucleotide with phosphorothioate linkage
  modified_base 3: mod_base = OTHER; note = 2'-fluoro modified nucleotide
  modified_base 4: mod_base = OTHER; note = 2'-O-methyl modified nucleotide
  modified_base 5: mod_base = OTHER; note = 2'-fluoro modified nucleotide
  modified_base 6: mod_base = OTHER; note = 2'-O-methyl modified nucleotide
  modified_base 7: mod_base = OTHER; note = 2'-fluoro modified nucleotide
  modified_base 8: mod_base = OTHER; note = 2'-O-methyl modified nucleotide
  modified_base 9: mod_base = OTHER; note = 2'-fluoro modified nucleotide
  modified_base 10: mod_base = OTHER; note = 2'-O-methyl modified nucleotide
  modified_base 11: mod_base = OTHER; note = 2'-fluoro modified nucleotide
  modified_base 12: mod_base = OTHER; note = 2'-O-methyl modified nucleotide
  modified_base 13: mod_base = OTHER; note = 2'-fluoro modified nucleotide with phosphorothioate linkage
  modified_base 14: mod_base = OTHER; note = 2'-O-methyl modified nucleotide with phosphorothioate linkage
  misc_difference 15: note = 2'-fluoro modified nucleotide may be attached to trivalent N-Acetylgalactosamine
catggccctcacgga

SEQ ID NO: 939 - RNA, 15 nt, synthetic construct
  source 1..15: mol_type = other RNA
  modified_base 1: mod_base = OTHER; note = 2'-fluoro modified nucleotide with phosphorothioate linkage
  modified_base 2: mod_base = OTHER; note = 2'-O-methyl modified nucleotide with phosphorothioate linkage
  modified_base 3: mod_base = OTHER; note = 2'-fluoro modified nucleotide
  modified_base 4: mod_base = OTHER; note = 2'-O-methyl modified nucleotide
  modified_base 5: mod_base = OTHER; note = 2'-fluoro modified nucleotide
  modified_base 6: mod_base = OTHER; note = 2'-O-methyl modified nucleotide
  modified_base 7: mod_base = OTHER; note = 2'-fluoro modified nucleotide
  modified_base 8: mod_base = OTHER; note = 2'-O-methyl modified nucleotide
  modified_base 9: mod_base = OTHER; note = 2'-fluoro modified nucleotide
  modified_base 10: mod_base = OTHER; note = 2'-O-methyl modified nucleotide
  modified_base 11: mod_base = OTHER; note = 2'-fluoro modified nucleotide
  modified_base 12: mod_base = OTHER; note = 2'-O-methyl modified nucleotide
  modified_base 13: mod_base = OTHER; note = 2'-fluoro modified nucleotide with phosphorothioate linkage
  modified_base 14: mod_base = OTHER; note = 2'-O-methyl modified nucleotide with phosphorothioate linkage
  misc_difference 15: note = 2'-fluoro modified nucleotide may be attached to trivalent N-Acetylgalactosamine
caacattgagaacca

SEQ ID NO: 940 - RNA, 15 nt, synthetic construct
  source 1..15: mol_type = other RNA
  modified_base 1: mod_base = OTHER; note = 2'-fluoro modified nucleotide with phosphorothioate linkage
  modified_base 2: mod_base = OTHER; note = 2'-O-methyl modified nucleotide with phosphorothioate linkage
  modified_base 3: mod_base = OTHER; note = 2'-fluoro modified nucleotide
  modified_base 4: mod_base = OTHER; note = 2'-O-methyl modified nucleotide
  modified_base 5: mod_base = OTHER; note = 2'-fluoro modified nucleotide
  modified_base 6: mod_base = OTHER; note = 2'-O-methyl modified nucleotide
  modified_base 7: mod_base = OTHER; note = 2'-fluoro modified nucleotide
  modified_base 8: mod_base = OTHER; note = 2'-O-methyl modified nucleotide
  modified_base 9: mod_base = OTHER; note = 2'-fluoro modified nucleotide
  modified_base 10: mod_base = OTHER; note = 2'-O-methyl modified nucleotide
  modified_base 11: mod_base = OTHER; note = 2'-fluoro modified nucleotide
  modified_base 12: mod_base = OTHER; note = 2'-O-methyl modified nucleotide
  modified_base 13: mod_base = OTHER; note = 2'-fluoro modified nucleotide with phosphorothioate linkage
  modified_base 14: mod_base = OTHER; note = 2'-O-methyl modified nucleotide with phosphorothioate linkage
  misc_difference 15: note = 2'-fluoro modified nucleotide may be attached to trivalent N-Acetylgalactosamine
agtgacggtgtcaga

SEQ ID NO: 941 - RNA, 15 nt, synthetic construct
  source 1..15: mol_type = other RNA
  modified_base 1: mod_base = OTHER; note = 2'-fluoro modified nucleotide with phosphorothioate linkage
  modified_base 2: mod_base = OTHER; note = 2'-O-methyl modified nucleotide with phosphorothioate linkage
  modified_base 3: mod_base = OTHER; note = 2'-fluoro modified nucleotide
  modified_base 4: mod_base = OTHER; note = 2'-O-methyl modified nucleotide
  modified_base 5: mod_base = OTHER; note = 2'-fluoro modified nucleotide
  modified_base 6: mod_base = OTHER; note = 2'-O-methyl modified nucleotide
  modified_base 7: mod_base = OTHER; note = 2'-fluoro modified nucleotide
  modified_base 8: mod_base = OTHER; note = 2'-O-methyl modified nucleotide
  modified_base 9: mod_base = OTHER; note = 2'-fluoro modified nucleotide
  modified_base 10: mod_base = OTHER; note = 2'-O-methyl modified nucleotide
  modified_base 11: mod_base = OTHER; note = 2'-fluoro modified nucleotide
  modified_base 12: mod_base = OTHER; note = 2'-O-methyl modified nucleotide
  modified_base 13: mod_base = OTHER; note = 2'-fluoro modified nucleotide with phosphorothioate linkage
  modified_base 14: mod_base = OTHER; note = 2'-O-methyl modified nucleotide with phosphorothioate linkage
  misc_difference 15: note = 2'-fluoro modified nucleotide may be attached to trivalent N-Acetylgalactosamine
agtttcgaggtcata

SEQ ID NO: 942 - RNA, 15 nt, synthetic construct
  source 1..15: mol_type = other RNA
  modified_base 1: mod_base = OTHER; note = 2'-fluoro modified nucleotide with phosphorothioate linkage
  modified_base 2: mod_base = OTHER; note = 2'-O-methyl modified nucleotide with phosphorothioate linkage
  modified_base 3: mod_base = OTHER; note = 2'-fluoro modified nucleotide
  modified_base 4: mod_base = OTHER; note = 2'-O-methyl modified nucleotide
  modified_base 5: mod_base = OTHER; note = 2'-fluoro modified nucleotide
  modified_base 6: mod_base = OTHER; note = 2'-O-methyl modified nucleotide
  modified_base 7: mod_base = OTHER; note = 2'-fluoro modified nucleotide
  modified_base 8: mod_base = OTHER; note = 2'-O-methyl modified nucleotide
  modified_base 9: mod_base = OTHER; note = 2'-fluoro modified nucleotide
  modified_base 10: mod_base = OTHER; note = 2'-O-methyl modified nucleotide
  modified_base 11: mod_base = OTHER; note = 2'-fluoro modified nucleotide
  modified_base 12: mod_base = OTHER; note = 2'-O-methyl modified nucleotide
  modified_base 13: mod_base = OTHER; note = 2'-fluoro modified nucleotide with phosphorothioate linkage
  modified_base 14: mod_base = OTHER; note = 2'-O-methyl modified nucleotide with phosphorothioate linkage
  misc_difference 15: note = 2'-fluoro modified nucleotide may be attached to trivalent N-Acetylgalactosamine
taaattcgacctcaa

SEQ ID NO: 943 - RNA, 15 nt, synthetic construct
  source 1..15: mol_type = other RNA
  modified_base 1: mod_base = OTHER; note = 2'-fluoro modified nucleotide with phosphorothioate linkage
  modified_base 2: mod_base = OTHER; note = 2'-O-methyl modified nucleotide with phosphorothioate linkage
  modified_base 3: mod_base = OTHER; note = 2'-fluoro modified nucleotide
  modified_base 4: mod_base = OTHER; note = 2'-O-methyl modified nucleotide
  modified_base 5: mod_base = OTHER; note = 2'-fluoro modified nucleotide
  modified_base 6: mod_base = OTHER; note = 2'-O-methyl modified nucleotide
  modified_base 7: mod_base = OTHER; note = 2'-fluoro modified nucleotide
  modified_base 8: mod_base = OTHER; note = 2'-O-methyl modified nucleotide
  modified_base 9: mod_base = OTHER; note = 2'-fluoro modified nucleotide
  modified_base 10: mod_base = OTHER; note = 2'-O-methyl modified nucleotide
  modified_base 11: mod_base = OTHER; note = 2'-fluoro modified nucleotide
  modified_base 12: mod_base = OTHER; note = 2'-O-methyl modified nucleotide
  modified_base 13: mod_base = OTHER; note = 2'-fluoro modified nucleotide with phosphorothioate linkage
  modified_base 14: mod_base = OTHER; note = 2'-O-methyl modified nucleotide with phosphorothioate linkage
  misc_difference 15: note = 2'-fluoro modified nucleotide may be attached to trivalent N-Acetylgalactosamine
ccaaggaaaatgaga

SEQ ID NO: 944 - RNA, 15 nt, synthetic construct
  source 1..15: mol_type = other RNA
  modified_base 1: mod_base = OTHER; note = 2'-fluoro modified nucleotide with phosphorothioate linkage
  modified_base 2: mod_base = OTHER; note = 2'-O-methyl modified nucleotide with phosphorothioate linkage
  modified_base 3: mod_base = OTHER; note = 2'-fluoro modified nucleotide
  modified_base 4: mod_base = OTHER; note = 2'-O-methyl modified nucleotide
  modified_base 5: mod_base = OTHER; note = 2'-fluoro modified nucleotide
  modified_base 6: mod_base = OTHER; note = 2'-O-methyl modified nucleotide
  modified_base 7: mod_base = OTHER; note = 2'-fluoro modified nucleotide
  modified_base 8: mod_base = OTHER; note = 2'-O-methyl modified nucleotide
  modified_base 9: mod_base = OTHER; note = 2'-fluoro modified nucleotide
  modified_base 10: mod_base = OTHER; note = 2'-O-methyl modified nucleotide
  modified_base 11: mod_base = OTHER; note = 2'-fluoro modified nucleotide
  modified_base 12: mod_base = OTHER; note = 2'-O-methyl modified nucleotide
  modified_base 13: mod_base = OTHER; note = 2'-fluoro modified nucleotide with phosphorothioate linkage
  modified_base 14: mod_base = OTHER; note = 2'-O-methyl modified nucleotide with phosphorothioate linkage
  misc_difference 15: note = 2'-fluoro modified nucleotide may be attached to trivalent N-Acetylgalactosamine
cttcatacaaaagta

SEQ ID NO: 945 - RNA, 15 nt, synthetic construct
  source 1..15: mol_type = other RNA
  modified_base 1: mod_base = OTHER; note = 2'-fluoro modified nucleotide with phosphorothioate linkage
  modified_base 2: mod_base = OTHER; note = 2'-O-methyl modified nucleotide with phosphorothioate linkage
  modified_base 3: mod_base = OTHER; note = 2'-fluoro modified nucleotide
  modified_base 4: mod_base = OTHER; note = 2'-O-methyl modified nucleotide
  modified_base 5: mod_base = OTHER; note = 2'-fluoro modified nucleotide
  modified_base 6: mod_base = OTHER; note = 2'-O-methyl modified nucleotide
  modified_base 7: mod_base = OTHER; note = 2'-fluoro modified nucleotide
  modified_base 8: mod_base = OTHER; note = 2'-O-methyl modified nucleotide
  modified_base 9: mod_base = OTHER; note = 2'-fluoro modified nucleotide
  modified_base 10: mod_base = OTHER; note = 2'-O-methyl modified nucleotide
  modified_base 11: mod_base = OTHER; note = 2'-fluoro modified nucleotide
  modified_base 12: mod_base = OTHER; note = 2'-O-methyl modified nucleotide
  modified_base 13: mod_base = OTHER; note = 2'-fluoro modified nucleotide with phosphorothioate linkage
  modified_base 14: mod_base = OTHER; note = 2'-O-methyl modified nucleotide with phosphorothioate linkage
  misc_difference 15: note = 2'-fluoro modified nucleotide may be attached to trivalent N-Acetylgalactosamine
aaggtctcacactca

SEQ ID NO: 946 - RNA, 15 nt, synthetic construct
  source 1..15: mol_type = other RNA
  modified_base 1: mod_base = OTHER; note = 2'-fluoro modified nucleotide with phosphorothioate linkage
  modified_base 2: mod_base = OTHER; note = 2'-O-methyl modified nucleotide with phosphorothioate linkage
  modified_base 3: mod_base = OTHER; note = 2'-fluoro modified nucleotide
  modified_base 4: mod_base = OTHER; note = 2'-O-methyl modified nucleotide
  modified_base 5: mod_base = OTHER; note = 2'-fluoro modified nucleotide
  modified_base 6: mod_base = OTHER; note = 2'-O-methyl modified nucleotide
  modified_base 7: mod_base = OTHER; note = 2'-fluoro modified nucleotide
  modified_base 8: mod_base = OTHER; note = 2'-O-methyl modified nucleotide
  modified_base 9: mod_base = OTHER; note = 2'-fluoro modified nucleotide
  modified_base 10: mod_base = OTHER; note = 2'-O-methyl modified nucleotide
  modified_base 11: mod_base = OTHER; note = 2'-fluoro modified nucleotide
  modified_base 12: mod_base = OTHER; note = 2'-O-methyl modified nucleotide
  modified_base 13: mod_base = OTHER; note = 2'-fluoro modified nucleotide with phosphorothioate linkage
  modified_base 14: mod_base = OTHER; note = 2'-O-methyl modified nucleotide with phosphorothioate linkage
  misc_difference 15: note = 2'-fluoro modified nucleotide may be attached to trivalent N-Acetylgalactosamine
ctgtaataaattcga

SEQ ID NO: 947 - RNA, 15 nt, synthetic construct
  source 1..15: mol_type = other RNA
  modified_base 1: mod_base = OTHER; note = 2'-fluoro modified nucleotide with phosphorothioate linkage
  modified_base 2: mod_base = OTHER; note = 2'-O-methyl modified nucleotide with phosphorothioate linkage
  modified_base 3: mod_base = OTHER; note = 2'-fluoro modified nucleotide
  modified_base 4: mod_base = OTHER; note = 2'-O-methyl modified nucleotide
  modified_base 5: mod_base = OTHER; note = 2'-fluoro modified nucleotide
  modified_base 6: mod_base = OTHER; note = 2'-O-methyl modified nucleotide
  modified_base 7: mod_base = OTHER; note = 2'-fluoro modified nucleotide
  modified_base 8: mod_base = OTHER; note = 2'-O-methyl modified nucleotide
  modified_base 9: mod_base = OTHER; note = 2'-fluoro modified nucleotide
  modified_base 10: mod_base = OTHER; note = 2'-O-methyl modified nucleotide
  modified_base 11: mod_base = OTHER; note = 2'-fluoro modified nucleotide
  modified_base 12: mod_base = OTHER; note = 2'-O-methyl modified nucleotide
  modified_base 13: mod_base = OTHER; note = 2'-fluoro modified nucleotide with phosphorothioate linkage
  modified_base 14: mod_base = OTHER; note = 2'-O-methyl modified nucleotide with phosphorothioate linkage
  misc_difference 15: note = 2'-fluoro modified nucleotide may be attached to trivalent N-Acetylgalactosamine
tgaggtgcaggttga

SEQ ID NO: 948 - RNA, 15 nt, synthetic construct
  source 1..15: mol_type = other RNA
  modified_base 1: mod_base = OTHER; note = 2'-fluoro modified nucleotide with phosphorothioate linkage
  modified_base 2: mod_base = OTHER; note = 2'-O-methyl modified nucleotide with phosphorothioate linkage
  modified_base 3: mod_base = OTHER; note = 2'-fluoro modified nucleotide
  modified_base 4: mod_base = OTHER; note = 2'-O-methyl modified nucleotide
  modified_base 5: mod_base = OTHER; note = 2'-fluoro modified nucleotide
  modified_base 6: mod_base = OTHER; note = 2'-O-methyl modified nucleotide
  modified_base 7: mod_base = OTHER; note = 2'-fluoro modified nucleotide
  modified_base 8: mod_base = OTHER; note = 2'-O-methyl modified nucleotide
  modified_base 9: mod_base = OTHER; note = 2'-fluoro modified nucleotide
  modified_base 10: mod_base = OTHER; note = 2'-O-methyl modified nucleotide
  modified_base 11: mod_base = OTHER; note = 2'-fluoro modified nucleotide
  modified_base 12: mod_base = OTHER; note = 2'-O-methyl modified nucleotide
  modified_base 13: mod_base = OTHER; note = 2'-fluoro modified nucleotide with phosphorothioate linkage
  modified_base 14: mod_base = OTHER; note = 2'-O-methyl modified nucleotide with phosphorothioate linkage
  misc_difference 15: note = 2'-fluoro modified nucleotide may be attached to trivalent N-Acetylgalactosamine
ggtctcacactctga

SEQ ID NO: 949 - RNA, 15 nt, synthetic construct
  source 1..15: mol_type = other RNA
  modified_base 1: mod_base = OTHER; note = 2'-fluoro modified nucleotide with phosphorothioate linkage
  modified_base 2: mod_base = OTHER; note = 2'-O-methyl modified nucleotide with phosphorothioate linkage
  modified_base 3: mod_base = OTHER; note = 2'-fluoro modified nucleotide
  modified_base 4: mod_base = OTHER; note = 2'-O-methyl modified nucleotide
  modified_base 5: mod_base = OTHER; note = 2'-fluoro modified nucleotide
  modified_base 6: mod_base = OTHER; note = 2'-O-methyl modified nucleotide
  modified_base 7: mod_base = OTHER; note = 2'-fluoro modified nucleotide
  modified_base 8: mod_base = OTHER; note = 2'-O-methyl modified nucleotide
  modified_base 9: mod_base = OTHER; note = 2'-fluoro modified nucleotide
  modified_base 10: mod_base = OTHER; note = 2'-O-methyl modified nucleotide
  modified_base 11: mod_base = OTHER; note = 2'-fluoro modified nucleotide
  modified_base 12: mod_base = OTHER; note = 2'-O-methyl modified nucleotide
  modified_base 13: mod_base = OTHER; note = 2'-fluoro modified nucleotide with phosphorothioate linkage
  modified_base 14: mod_base = OTHER; note = 2'-O-methyl modified nucleotide with phosphorothioate linkage
  misc_difference 15: note = 2'-fluoro modified nucleotide may be attached to trivalent N-Acetylgalactosamine
caatgaacagagata

SEQ ID NO: 950 - RNA, 15 nt, synthetic construct
  source 1..15: mol_type = other RNA
  modified_base 1: mod_base = OTHER; note = 2'-fluoro modified nucleotide with phosphorothioate linkage
  modified_base 2: mod_base = OTHER; note = 2'-O-methyl modified nucleotide with phosphorothioate linkage
  modified_base 3: mod_base = OTHER; note = 2'-fluoro modified nucleotide
  modified_base 4: mod_base = OTHER; note = 2'-O-methyl modified nucleotide
  modified_base 5: mod_base = OTHER; note = 2'-fluoro modified nucleotide
  modified_base 6: mod_base = OTHER; note = 2'-O-methyl modified nucleotide
  modified_base 7: mod_base = OTHER; note = 2'-fluoro modified nucleotide
  modified_base 8: mod_base = OTHER; note = 2'-O-methyl modified nucleotide
  modified_base 9: mod_base = OTHER; note = 2'-fluoro modified nucleotide
  modified_base 10: mod_base = OTHER; note = 2'-O-methyl modified nucleotide
  modified_base 11: mod_base = OTHER; note = 2'-fluoro modified nucleotide
  modified_base 12: mod_base = OTHER; note = 2'-O-methyl modified nucleotide
  modified_base 13: mod_base = OTHER; note = 2'-fluoro modified nucleotide with phosphorothioate linkage
  modified_base 14: mod_base = OTHER; note = 2'-O-methyl modified nucleotide with phosphorothioate linkage
  misc_difference 15: note = 2'-fluoro modified nucleotide may be attached to trivalent N-Acetylgalactosamine
aatgcaggacttcta

SEQ ID NO: 951 - RNA, 33 nt, synthetic construct; identical to SEQ ID NO: 501
  source 1..33: mol_type = other RNA
  misc_difference 1: note = 2'-O-methyl modified nucleotide with phosphorothioate linkage may be modified with 5'-Phosphate
  modified_base 2: mod_base = OTHER; note = 2'-fluoro modified nucleotide with phosphorothioate linkage
  modified_base 3: mod_base = OTHER; note = 2'-O-methyl modified nucleotide
  modified_base 4: mod_base = OTHER; note = 2'-fluoro modified nucleotide
  modified_base 5: mod_base = OTHER; note = 2'-O-methyl modified nucleotide
  modified_base 6: mod_base = OTHER; note = 2'-fluoro modified nucleotide
  modified_base 7: mod_base = OTHER; note = 2'-O-methyl modified nucleotide
  modified_base 8: mod_base = OTHER; note = 2'-fluoro modified nucleotide
  modified_base 9: mod_base = OTHER; note = 2'-O-methyl modified nucleotide
  modified_base 10: mod_base = OTHER; note = 2'-fluoro modified nucleotide
  modified_base 11: mod_base = OTHER; note = 2'-O-methyl modified nucleotide
  modified_base 12: mod_base = OTHER; note = 2'-fluoro modified nucleotide
  modified_base 13: mod_base = OTHER; note = 2'-O-methyl modified nucleotide
  modified_base 14: mod_base = OTHER; note = 2'-fluoro modified nucleotide with phosphorothioate linkage
  modified_base 15: mod_base = OTHER; note = 2'-O-methyl modified nucleotide with phosphorothioate linkage
  modified_base 16: mod_base = OTHER; note = 2'-fluoro modified nucleotide with phosphorothioate linkage
  modified_base 17: mod_base = OTHER; note = 2'-O-methyl modified nucleotide with phosphorothioate linkage
  modified_base 18: mod_base = OTHER; note = 2'-fluoro modified nucleotide with phosphorothioate linkage
  modified_base 19: mod_base = OTHER; note = 2'-O-methyl modified nucleotide with phosphorothioate linkage
  modified_base 20: mod_base = OTHER; note = 2'-O-methyl modified nucleotide
  modified_base 21: mod_base = OTHER; note = 2'-fluoro modified nucleotide
  modified_base 22: mod_base = OTHER; note = 2'-O-methyl modified nucleotide
  modified_base 23: mod_base = OTHER; note = 2'-fluoro modified nucleotide
  modified_base 24: mod_base = OTHER; note = 2'-O-methyl modified nucleotide
  modified_base 25: mod_base = OTHER; note = 2'-fluoro modified nucleotide
  modified_base 26: mod_base = OTHER; note = 2'-O-methyl modified nucleotide
  modified_base 27: mod_base = OTHER; note = 2'-fluoro modified nucleotide
  modified_base 28: mod_base = OTHER; note = 2'-O-methyl modified nucleotide
  modified_base 29: mod_base = OTHER; note = 2'-fluoro modified nucleotide
  modified_base 30: mod_base = OTHER; note = 2'-O-methyl modified nucleotide
  modified_base 31: mod_base = OTHER; note = 2'-fluoro modified nucleotide with phosphorothioate linkage
  modified_base 32: mod_base = OTHER; note = 2'-O-methyl modified nucleotide with phosphorothioate linkage
  misc_difference 33: note = 2'-fluoro modified nucleotide with phosphorothioate linkage may be attached to trivalent N-Acetylgalactosamine

SEQ ID NO: 952 - RNA, 33 nt, synthetic construct
  source 1..33: mol_type = other RNA
  misc_difference 1: note = 2'-O-methyl modified nucleotide with phosphorothioate linkage may be modified with 5'-Phosphate
  modified_base 2: mod_base = OTHER; note = 2'-fluoro modified nucleotide with phosphorothioate linkage
  modified_base 3: mod_base = OTHER; note = 2'-O-methyl modified nucleotide
  modified_base 4: mod_base = OTHER; note = 2'-fluoro modified nucleotide
  modified_base 5: mod_base = OTHER; note = 2'-O-methyl modified nucleotide
  modified_base 6: mod_base = OTHER; note = 2'-fluoro modified nucleotide
  modified_base 7: mod_base = OTHER; note = 2'-O-methyl modified nucleotide
  modified_base 8: mod_base = OTHER; note = 2'-fluoro modified nucleotide
  modified_base 9: mod_base = OTHER; note = 2'-O-methyl modified nucleotide
  modified_base 10: mod_base = OTHER; note = 2'-fluoro modified nucleotide
  modified_base 11: mod_base = OTHER; note = 2'-O-methyl modified nucleotide
  modified_base 12: mod_base = OTHER; note = 2'-fluoro modified nucleotide
  modified_base 13: mod_base = OTHER; note = 2'-O-methyl modified nucleotide
  modified_base 14: mod_base = OTHER; note = 2'-fluoro modified nucleotide with phosphorothioate linkage
  modified_base 15: mod_base = OTHER; note = 2'-O-methyl modified nucleotide with phosphorothioate linkage
  modified_base 16: mod_base = OTHER; note = 2'-fluoro modified nucleotide with phosphorothioate linkage
  modified_base 17: mod_base = OTHER; note = 2'-O-methyl modified nucleotide with phosphorothioate linkage
  modified_base 18: mod_base = OTHER; note = 2'-fluoro modified nucleotide with phosphorothioate linkage
  modified_base 19: mod_base = OTHER; note = 2'-O-methyl modified nucleotide with phosphorothioate linkage
  modified_base 20: mod_base = OTHER; note = 2'-O-methyl modified nucleotide
  modified_base 21: mod_base = OTHER; note = 2'-fluoro modified nucleotide
  modified_base 22: mod_base = OTHER; note = 2'-O-methyl modified nucleotide
  modified_base 23: mod_base = OTHER; note = 2'-fluoro modified nucleotide
  modified_base 24: mod_base = OTHER; note = 2'-O-methyl modified nucleotide
  modified_base 25: mod_base = OTHER; note = 2'-fluoro modified nucleotide
  modified_base 26: mod_base = OTHER; note = 2'-O-methyl modified nucleotide
  modified_base 27: mod_base = OTHER; note = 2'-fluoro modified nucleotide
  modified_base 28: mod_base = OTHER; note = 2'-O-methyl modified nucleotide
  modified_base 29: mod_base = OTHER; note = 2'-fluoro modified nucleotide
  modified_base 30: mod_base = OTHER; note = 2'-O-methyl modified nucleotide
  modified_base 31: mod_base = OTHER; note = 2'-fluoro modified nucleotide with phosphorothioate linkage
  modified_base 32: mod_base = OTHER; note = 2'-O-methyl modified nucleotide with phosphorothioate linkage
  misc_difference 33: note = 2'-fluoro modified nucleotide with phosphorothioate linkage may be attached to trivalent N-Acetylgalactosamine
tgagagaagaccttgaccaaaggtcttctctca

SEQ ID NO: 953 - RNA, 33 nt, synthetic construct
  source 1..33: mol_type = other RNA
  misc_difference 1: note = 2'-O-methyl modified nucleotide with phosphorothioate linkage may be modified with 5'-Phosphate
  modified_base 2: mod_base = OTHER; note = 2'-fluoro modified nucleotide with phosphorothioate linkage
  modified_base 3: mod_base = OTHER; note = 2'-O-methyl modified nucleotide
  modified_base 4: mod_base = OTHER; note = 2'-fluoro modified nucleotide
  modified_base 5: mod_base = OTHER; note = 2'-O-methyl modified nucleotide
  modified_base 6: mod_base = OTHER; note = 2'-fluoro modified nucleotide
  modified_base 7: mod_base = OTHER; note = 2'-O-methyl modified nucleotide
  modified_base 8: mod_base = OTHER; note = 2'-fluoro modified nucleotide
  modified_base 9: mod_base = OTHER; note = 2'-O-methyl modified nucleotide
  modified_base 10: mod_base = OTHER; note = 2'-fluoro modified nucleotide
  modified_base 11: mod_base = OTHER; note = 2'-O-methyl modified nucleotide
  modified_base 12: mod_base = OTHER; note = 2'-fluoro modified nucleotide
  modified_base 13: mod_base = OTHER; note = 2'-O-methyl modified nucleotide
  modified_base 14: mod_base = OTHER; note = 2'-fluoro modified nucleotide with phosphorothioate linkage
  modified_base 15: mod_base = OTHER; note = 2'-O-methyl modified nucleotide with phosphorothioate linkage
  modified_base 16: mod_base = OTHER; note = 2'-fluoro modified nucleotide with phosphorothioate linkage
  modified_base 17: mod_base = OTHER; note = 2'-O-methyl modified nucleotide with phosphorothioate linkage
  modified_base 18: mod_base = OTHER; note = 2'-fluoro modified nucleotide with phosphorothioate linkage
  modified_base 19: mod_base = OTHER; note = 2'-O-methyl modified nucleotide with phosphorothioate linkage
  modified_base 20: mod_base = OTHER; note = 2'-O-methyl modified nucleotide
  modified_base 21: mod_base = OTHER; note = 2'-fluoro modified nucleotide
  modified_base 22: mod_base = OTHER; note = 2'-O-methyl modified nucleotide
  modified_base 23: mod_base = OTHER; note = 2'-fluoro modified nucleotide
  modified_base 24: mod_base = OTHER; note = 2'-O-methyl modified nucleotide
  modified_base 25: mod_base = OTHER; note = 2'-fluoro modified nucleotide
  modified_base 26: mod_base = OTHER; note = 2'-O-methyl modified nucleotide
  modified_base 27: mod_base = OTHER; note = 2'-fluoro modified nucleotide
  modified_base 28: mod_base = OTHER; note = 2'-O-methyl modified nucleotide
  modified_base 29: mod_base = OTHER; note = 2'-fluoro modified nucleotide
  modified_base 30: mod_base = OTHER; note = 2'-O-methyl modified nucleotide
  modified_base 31: mod_base = OTHER; note = 2'-fluoro modified nucleotide with phosphorothioate linkage
  modified_base 32: mod_base = OTHER; note = 2'-O-methyl modified nucleotide with phosphorothioate linkage
  misc_difference 33: note = 2'-fluoro modified nucleotide with phosphorothioate linkage may be attached to trivalent N-Acetylgalactosamine
tcacacagatccctttcttagggatctgtgtga

SEQ ID NO: 954 - RNA, 33 nt, synthetic construct
  source 1..33: mol_type = other RNA
  misc_difference 1: note = 2'-O-methyl modified nucleotide with phosphorothioate linkage may be modified with 5'-Phosphate
  modified_base 2: mod_base = OTHER; note = 2'-fluoro modified nucleotide with phosphorothioate linkage
  modified_base 3: mod_base = OTHER; note = 2'-O-methyl modified nucleotide
  modified_base 4: mod_base = OTHER; note = 2'-fluoro modified nucleotide
  modified_base 5: mod_base = OTHER; note = 2'-O-methyl modified nucleotide
  modified_base 6: mod_base = OTHER; note = 2'-fluoro modified nucleotide
  modified_base 7: mod_base = OTHER; note = 2'-O-methyl modified nucleotide
  modified_base 8: mod_base = OTHER; note = 2'-fluoro modified nucleotide
  modified_base 9: mod_base = OTHER; note = 2'-O-methyl modified nucleotide
  modified_base 10: mod_base = OTHER; note = 2'-fluoro modified nucleotide
  modified_base 11: mod_base = OTHER; note = 2'-O-methyl modified nucleotide
  modified_base 12: mod_base = OTHER; note = 2'-fluoro modified nucleotide
  modified_base 13: mod_base = OTHER; note = 2'-O-methyl modified nucleotide
  modified_base 14: mod_base = OTHER; note = 2'-fluoro modified nucleotide with phosphorothioate linkage
  modified_base 15: mod_base = OTHER; note = 2'-O-methyl modified nucleotide with phosphorothioate linkage
  modified_base 16: mod_base = OTHER; note = 2'-fluoro modified nucleotide with phosphorothioate linkage
  modified_base 17: mod_base = OTHER; note = 2'-O-methyl modified nucleotide with phosphorothioate linkage
  modified_base 18: mod_base = OTHER; note = 2'-fluoro modified nucleotide with phosphorothioate linkage
  modified_base 19: mod_base = OTHER; note = 2'-O-methyl modified nucleotide with phosphorothioate linkage
  modified_base 20: mod_base = OTHER; note = 2'-O-methyl modified nucleotide
  modified_base 21: mod_base = OTHER; note = 2'-fluoro modified nucleotide
  modified_base 22: mod_base = OTHER; note = 2'-O-methyl modified nucleotide
  modified_base 23: mod_base = OTHER; note = 2'-fluoro modified nucleotide
  modified_base 24: mod_base = OTHER; note = 2'-O-methyl modified nucleotide
  modified_base 25: mod_base = OTHER; note = 2'-fluoro modified nucleotide
  modified_base 26: mod_base = OTHER; note = 2'-O-methyl modified nucleotide
  modified_base 27: mod_base = OTHER; note = 2'-fluoro modified nucleotide
  modified_base 28: mod_base = OTHER; note = 2'-O-methyl modified nucleotide
  modified_base 29: mod_base = OTHER; note = 2'-fluoro modified nucleotide
  modified_base 30: mod_base = OTHER; note = 2'-O-methyl modified nucleotide
  modified_base 31: mod_base = OTHER; note = 2'-fluoro modified nucleotide with phosphorothioate linkage
  modified_base 32: mod_base = OTHER; note = 2'-O-methyl modified nucleotide with phosphorothioate linkage
  misc_difference 33: note = 2'-fluoro modified nucleotide with phosphorothioate linkage may be attached to trivalent N-Acetylgalactosamine
ttgtagatggtcttgtctgaagaccatctacaa

SEQ ID NO: 955 - RNA, 33 nt, synthetic construct
  source 1..33: mol_type = other RNA
  misc_difference 1: note = 2'-O-methyl modified nucleotide with phosphorothioate linkage may be modified with 5'-Phosphate
  modified_base 2: mod_base = OTHER; note = 2'-fluoro modified nucleotide with phosphorothioate linkage
  modified_base 3: mod_base = OTHER; note = 2'-O-methyl modified nucleotide
  modified_base 4: mod_base = OTHER; note = 2'-fluoro modified nucleotide
  modified_base 5: mod_base = OTHER; note = 2'-O-methyl modified nucleotide
  modified_base 6: mod_base = OTHER; note = 2'-fluoro modified nucleotide
  modified_base 7: mod_base = OTHER; note = 2'-O-methyl modified nucleotide
  modified_base 8: mod_base = OTHER; note = 2'-fluoro modified nucleotide
  modified_base 9: mod_base = OTHER; note = 2'-O-methyl modified nucleotide
  modified_base 10: mod_base = OTHER; note = 2'-fluoro modified nucleotide
  modified_base 11: mod_base = OTHER; note = 2'-O-methyl modified nucleotide
  modified_base 12: mod_base = OTHER; note = 2'-fluoro modified nucleotide
  modified_base 13: mod_base = OTHER; note = 2'-O-methyl modified nucleotide
  modified_base 14: mod_base = OTHER; note = 2'-fluoro modified nucleotide with phosphorothioate linkage
  modified_base 15: mod_base = OTHER; note = 2'-O-methyl modified nucleotide with phosphorothioate linkage
  modified_base 16: mod_base = OTHER; note = 2'-fluoro modified nucleotide with phosphorothioate linkage
  modified_base 17: mod_base = OTHER; note = 2'-O-methyl modified nucleotide with phosphorothioate linkage
  modified_base 18: mod_base = OTHER; note = 2'-fluoro modified nucleotide with phosphorothioate linkage
  modified_base 19: mod_base = OTHER; note = 2'-O-methyl modified nucleotide with phosphorothioate linkage
  modified_base 20: mod_base = OTHER; note = 2'-O-methyl modified nucleotide
  modified_base 21: mod_base = OTHER; note = 2'-fluoro modified nucleotide
  modified_base 22: mod_base = OTHER; note = 2'-O-methyl modified nucleotide
  modified_base 23: mod_base = OTHER; note = 2'-fluoro modified nucleotide
  modified_base 24: mod_base = OTHER; note = 2'-O-methyl modified nucleotide
  modified_base 25: mod_base = OTHER; note = 2'-fluoro modified nucleotide
  modified_base 26: mod_base = OTHER; note = 2'-O-methyl modified nucleotide
  modified_base 27: mod_base = OTHER; note = 2'-fluoro modified nucleotide
  modified_base 28: mod_base = OTHER; note = 2'-O-methyl modified nucleotide
  modified_base 29: mod_base = OTHER; note = 2'-fluoro modified nucleotide
  modified_base 30: mod_base = OTHER; note = 2'-O-methyl modified nucleotide
  modified_base 31: mod_base = OTHER; note = 2'-fluoro modified nucleotide with phosphorothioate linkage
  modified_base 32: mod_base = OTHER; note = 2'-O-methyl modified nucleotide with phosphorothioate linkage
  misc_difference 33: note = 2'-fluoro modified nucleotide with phosphorothioate linkage may be attached to trivalent N-Acetylgalactosamine
tagagagaagaccttgaccaggtcttctctcta

SEQ ID NO: 956 - RNA, 33 nt, synthetic construct
  source 1..33: mol_type = other RNA
  misc_difference 1: note = 2'-O-methyl modified nucleotide with phosphorothioate linkage may be modified with 5'-Phosphate
  modified_base 2: mod_base = OTHER; note = 2'-fluoro modified nucleotide with phosphorothioate linkage
  modified_base 3: mod_base = OTHER; note = 2'-O-methyl modified nucleotide
  modified_base 4: mod_base = OTHER; note = 2'-fluoro modified nucleotide
  modified_base 5: mod_base = OTHER; note = 2'-O-methyl modified nucleotide
  modified_base 6: mod_base = OTHER; note = 2'-fluoro modified nucleotide
  modified_base 7: mod_base = OTHER; note = 2'-O-methyl modified nucleotide
  modified_base 8: mod_base = OTHER; note = 2'-fluoro modified nucleotide
  modified_base 9: mod_base = OTHER; note = 2'-O-methyl modified nucleotide
  modified_base 10: mod_base = OTHER; note = 2'-fluoro modified nucleotide
  modified_base 11: mod_base = OTHER; note = 2'-O-methyl modified nucleotide
  modified_base 12: mod_base = OTHER; note = 2'-fluoro modified nucleotide
  modified_base 13: mod_base = OTHER; note = 2'-O-methyl modified nucleotide
  modified_base 14: mod_base = OTHER; note = 2'-fluoro modified nucleotide with phosphorothioate linkage
  modified_base 15: mod_base = OTHER; note = 2'-O-methyl modified nucleotide with phosphorothioate linkage
  modified_base 16: mod_base = OTHER; note = 2'-fluoro modified nucleotide with phosphorothioate linkage
  modified_base 17: mod_base = OTHER; note = 2'-O-methyl modified nucleotide with phosphorothioate linkage
  modified_base 18: mod_base = OTHER; note = 2'-fluoro modified nucleotide with phosphorothioate linkage
  modified_base 19: mod_base = OTHER; note = 2'-O-methyl modified nucleotide with phosphorothioate linkage
  modified_base 20: mod_base = OTHER; note = 2'-O-methyl modified nucleotide
  modified_base 21: mod_base = OTHER; note = 2'-fluoro modified nucleotide
  modified_base 22: mod_base = OTHER; note = 2'-O-methyl modified nucleotide
  modified_base 23: mod_base = OTHER; note = 2'-fluoro modified nucleotide
  modified_base 24: mod_base = OTHER; note = 2'-O-methyl modified nucleotide
  modified_base 25: mod_base = OTHER; note = 2'-fluoro modified nucleotide
  modified_base 26: mod_base = OTHER; note = 2'-O-methyl modified nucleotide
  modified_base 27: mod_base = OTHER; note = 2'-fluoro modified nucleotide
  modified_base 28: mod_base = OTHER; note = 2'-O-methyl modified nucleotide
  modified_base 29: mod_base = OTHER; note = 2'-fluoro modified nucleotide
  modified_base 30: mod_base = OTHER; note = 2'-O-methyl modified nucleotide
  modified_base 31: mod_base = OTHER; note = 2'-fluoro modified nucleotide with phosphorothioate linkage
  modified_base 32: mod_base = OTHER; note = 2'-O-methyl modified nucleotide with phosphorothioate linkage
  misc_difference 33: note = 2'-fluoro modified nucleotide with phosphorothioate linkage may be attached to trivalent N-Acetylgalactosamine
tacacagatccctttcttgaagggatctgtgta

SEQ ID NO: 957 - RNA, 33 nt, synthetic construct
  source 1..33: mol_type = other RNA
  misc_difference 1: note = 2'-O-methyl modified nucleotide with phosphorothioate linkage may be modified with 5'-Phosphate
  modified_base 2: mod_base = OTHER; note = 2'-fluoro modified nucleotide with phosphorothioate linkage
  modified_base 3: mod_base = OTHER; note = 2'-O-methyl modified nucleotide
  modified_base 4: mod_base = OTHER; note = 2'-fluoro modified nucleotide
  modified_base 5: mod_base = OTHER; note = 2'-O-methyl modified nucleotide
  modified_base 6: mod_base = OTHER; note = 2'-fluoro modified nucleotide
  modified_base 7: mod_base = OTHER; note = 2'-O-methyl modified nucleotide
  modified_base 8: mod_base = OTHER; note = 2'-fluoro modified nucleotide
  modified_base 9: mod_base = OTHER; note = 2'-O-methyl modified nucleotide
  modified_base 10: mod_base = OTHER; note = 2'-fluoro modified nucleotide
  modified_base 11: mod_base = OTHER; note = 2'-O-methyl modified nucleotide
  modified_base 12: mod_base = OTHER; note = 2'-fluoro modified nucleotide
  modified_base 13: mod_base = OTHER; note = 2'-O-methyl modified nucleotide
  modified_base 14: mod_base = OTHER; note = 2'-fluoro modified nucleotide with phosphorothioate linkage
  modified_base 15: mod_base = OTHER; note = 2'-O-methyl modified nucleotide with phosphorothioate linkage
  modified_base 16: mod_base = OTHER; note = 2'-fluoro modified nucleotide with phosphorothioate linkage
  modified_base 17: mod_base = OTHER; note = 2'-O-methyl modified nucleotide with phosphorothioate linkage
  modified_base 18: mod_base = OTHER; note = 2'-fluoro modified nucleotide with phosphorothioate linkage
  modified_base 19: mod_base = OTHER; note = 2'-O-methyl modified nucleotide with phosphorothioate linkage
  modified_base 20: mod_base = OTHER; note = 2'-O-methyl modified nucleotide
  modified_base 21: mod_base = OTHER; note = 2'-fluoro modified nucleotide
  modified_base 22: mod_base = OTHER; note = 2'-O-methyl modified nucleotide
  modified_base 23: mod_base = OTHER; note = 2'-fluoro modified nucleotide
  modified_base 24: mod_base = OTHER; note = 2'-O-methyl modified nucleotide
  modified_base 25: mod_base = OTHER; note = 2'-fluoro modified nucleotide
  modified_base 26: mod_base = OTHER; note = 2'-O-methyl modified nucleotide
  modified_base 27: mod_base = OTHER; note = 2'-fluoro modified nucleotide
  modified_base 28: mod_base = OTHER; note = 2'-O-methyl modified nucleotide
  modified_base 29: mod_base = OTHER; note = 2'-fluoro modified nucleotide
  modified_base 30: mod_base = OTHER; note = 2'-O-methyl modified nucleotide
  modified_base 31: mod_base = OTHER; note = 2'-fluoro modified nucleotide with phosphorothioate linkage
  modified_base 32: mod_base = OTHER; note = 2'-O-methyl modified nucleotide with phosphorothioate linkage
  misc_difference 33: note = 2'-fluoro modified nucleotide with phosphorothioate linkage may be attached to trivalent N-Acetylgalactosamine
tcgaacaccatgaggtcaactcatggtgttcga

SEQ ID NO: 958 - RNA, 33 nt, synthetic construct
  source 1..33: mol_type = other RNA
  misc_difference 1: note = 2'-O-methyl modified nucleotide with phosphorothioate linkage may be modified with 5'-Phosphate
  modified_base 2: mod_base = OTHER; note = 2'-fluoro modified nucleotide with phosphorothioate linkage
  modified_base 3: mod_base = OTHER; note = 2'-O-methyl modified nucleotide
  modified_base 4: mod_base = OTHER; note = 2'-fluoro modified nucleotide
  modified_base 5: mod_base = OTHER; note = 2'-O-methyl modified nucleotide
  modified_base 6: mod_base = OTHER; note = 2'-fluoro modified nucleotide
  modified_base 7: mod_base = OTHER; note = 2'-O-methyl modified nucleotide
  modified_base 8: mod_base = OTHER; note = 2'-fluoro modified nucleotide
  modified_base 9: mod_base = OTHER; note = 2'-O-methyl modified nucleotide
  modified_base 10: mod_base = OTHER; note = 2'-fluoro modified nucleotide
  modified_base 11: mod_base = OTHER; note = 2'-O-methyl modified nucleotide
  modified_base 12: mod_base = OTHER; note = 2'-fluoro modified nucleotide
  modified_base 13: mod_base = OTHER; note = 2'-O-methyl modified nucleotide
  modified_base 14: mod_base = OTHER; note = 2'-fluoro modified nucleotide with phosphorothioate linkage
  modified_base 15: mod_base = OTHER; note = 2'-O-methyl modified nucleotide with phosphorothioate linkage
  modified_base 16: mod_base = OTHER; note = 2'-fluoro modified nucleotide with phosphorothioate linkage
  modified_base 17: mod_base = OTHER; note = 2'-O-methyl modified nucleotide with phosphorothioate linkage
  modified_base 18: mod_base = OTHER; note = 2'-fluoro modified nucleotide with phosphorothioate linkage
  modified_base 19: mod_base = OTHER; note = 2'-O-methyl modified nucleotide with phosphorothioate linkage
  modified_base 20: mod_base = OTHER; note = 2'-O-methyl modified nucleotide
  modified_base 21: mod_base = OTHER; note = 2'-fluoro modified nucleotide
  modified_base 22: mod_base = OTHER; note = 2'-O-methyl modified nucleotide
  modified_base 23: mod_base = OTHER; note = 2'-fluoro modified nucleotide
  modified_base 24: mod_base = OTHER; note = 2'-O-methyl modified nucleotide
  modified_base 25: mod_base = OTHER; note = 2'-fluoro modified nucleotide
  modified_base 26: mod_base = OTHER; note = 2'-O-methyl modified nucleotide
  modified_base 27: mod_base = OTHER; note = 2'-fluoro modified nucleotide
  modified_base 28: mod_base = OTHER; note = 2'-O-methyl modified nucleotide
  modified_base 29: mod_base = OTHER; note = 2'-fluoro modified nucleotide
  modified_base 30: mod_base = OTHER; note = 2'-O-methyl modified nucleotide
  modified_base 31: mod_base = OTHER; note = 2'-fluoro modified nucleotide with phosphorothioate linkage
  modified_base 32: mod_base = OTHER; note = 2'-O-methyl modified nucleotide with phosphorothioate linkage
  misc_difference 33: note = 2'-fluoro modified nucleotide with phosphorothioate linkage may be attached to trivalent N-Acetylgalactosamine
taccatgaggtcaaagggcttgacctcatggta

SEQ ID NO: 959 - RNA, 33 nt, synthetic construct
  source 1..33: mol_type = other RNA
  misc_difference 1: note = 2'-O-methyl modified nucleotide with phosphorothioate linkage may be modified with 5'-Phosphate
  modified_base 2: mod_base = OTHER; note = 2'-fluoro modified nucleotide with phosphorothioate linkage
  modified_base 3: mod_base = OTHER; note = 2'-O-methyl modified nucleotide
  modified_base 4: mod_base = OTHER; note = 2'-fluoro modified nucleotide
  modified_base 5: mod_base = OTHER; note = 2'-O-methyl modified nucleotide
  modified_base 6: mod_base = OTHER; note = 2'-fluoro modified nucleotide
  modified_base 7: mod_base = OTHER; note = 2'-O-methyl modified nucleotide
  modified_base 8: mod_base = OTHER; note = 2'-fluoro modified nucleotide
  modified_base 9: mod_base = OTHER; note = 2'-O-methyl modified nucleotide
  modified_base 10: mod_base = OTHER; note = 2'-fluoro modified nucleotide
  modified_base 11: mod_base = OTHER; note = 2'-O-methyl modified nucleotide
  modified_base 12: mod_base = OTHER; note = 2'-fluoro modified nucleotide
  modified_base 13: mod_base = OTHER; note = 2'-O-methyl modified nucleotide
  modified_base 14: mod_base = OTHER; note = 2'-fluoro modified nucleotide with phosphorothioate linkage
  modified_base 15: mod_base = OTHER; note = 2'-O-methyl modified nucleotide with phosphorothioate linkage
  modified_base 16: mod_base = OTHER; note = 2'-fluoro modified nucleotide with phosphorothioate linkage
  modified_base 17: mod_base = OTHER; note = 2'-O-methyl modified nucleotide with phosphorothioate linkage
  modified_base 18: mod_base = OTHER; note = 2'-fluoro modified nucleotide with phosphorothioate linkage
  modified_base 19: mod_base = OTHER; note = 2'-O-methyl modified nucleotide with phosphorothioate linkage
  modified_base 20: mod_base = OTHER; note = 2'-O-methyl modified nucleotide
  modified_base 21: mod_base = OTHER; note = 2'-fluoro modified nucleotide
  modified_base 22: mod_base = OTHER; note = 2'-O-methyl modified nucleotide
  modified_base 23: mod_base = OTHER; note = 2'-fluoro modified nucleotide
  modified_base 24: mod_base = OTHER; note = 2'-O-methyl modified nucleotide
  modified_base 25: mod_base = OTHER; note = 2'-fluoro modified nucleotide
  modified_base 26: mod_base = OTHER; note = 2'-O-methyl modified nucleotide
  modified_base 27: mod_base = OTHER; note = 2'-fluoro modified nucleotide
  modified_base 28: mod_base = OTHER; note = 2'-O-methyl modified nucleotide
  modified_base 29: mod_base = OTHER; note = 2'-fluoro modified nucleotide
  modified_base 30: mod_base = OTHER; note = 2'-O-methyl modified nucleotide
  modified_base 31: mod_base = OTHER; note = 2'-fluoro modified nucleotide with phosphorothioate linkage
  modified_base 32: mod_base = OTHER; note = 2'-O-methyl modified nucleotide with phosphorothioate linkage
  misc_difference 33: note = 2'-fluoro modified nucleotide with phosphorothioate linkage may be attached to trivalent N-Acetylgalactosamine
tagaccttgaccacgtagggtggtcaaggtcta

SEQ ID NO: 960 - RNA, 33 nt, synthetic construct
  source 1..33: mol_type = other RNA
  misc_difference 1: note = 2'-O-methyl modified nucleotide with phosphorothioate linkage may be modified with 5'-Phosphate
  modified_base 2: mod_base = OTHER; note = 2'-fluoro modified nucleotide with phosphorothioate linkage
  modified_base 3: mod_base = OTHER; note = 2'-O-methyl modified nucleotide
  modified_base 4: mod_base = OTHER; note = 2'-fluoro modified nucleotide
  modified_base 5: mod_base = OTHER; note = 2'-O-methyl modified nucleotide
  modified_base 6: mod_base = OTHER; note = 2'-fluoro modified nucleotide
  modified_base 7: mod_base = OTHER; note = 2'-O-methyl modified nucleotide
  modified_base 8: mod_base = OTHER; note = 2'-fluoro modified nucleotide
  modified_base 9: mod_base = OTHER; note = 2'-O-methyl modified nucleotide
  modified_base 10: mod_base = OTHER; note = 2'-fluoro modified nucleotide
  modified_base 11: mod_base = OTHER; note = 2'-O-methyl modified nucleotide
  modified_base 12: mod_base = OTHER; note = 2'-fluoro modified nucleotide
  modified_base 13: mod_base = OTHER; note = 2'-O-methyl modified nucleotide
  modified_base 14: mod_base = OTHER; note = 2'-fluoro modified nucleotide with phosphorothioate linkage
  modified_base 15: mod_base = OTHER; note = 2'-O-methyl modified nucleotide with phosphorothioate linkage
  modified_base 16: mod_base = OTHER; note = 2'-fluoro modified nucleotide with phosphorothioate linkage
  modified_base 17: mod_base = OTHER; note = 2'-O-methyl modified nucleotide with phosphorothioate linkage
  modified_base 18: mod_base = OTHER; note = 2'-fluoro modified nucleotide with phosphorothioate linkage
  modified_base 19: mod_base = OTHER; note = 2'-O-methyl modified nucleotide with phosphorothioate linkage
  modified_base 20: mod_base = OTHER; note = 2'-O-methyl modified nucleotide
  modified_base 21: mod_base = OTHER; note = 2'-fluoro modified nucleotide
  modified_base 22: mod_base = OTHER; note = 2'-O-methyl modified nucleotide
  modified_base 23: mod_base = OTHER; note = 2'-fluoro modified nucleotide
  modified_base 24: mod_base = OTHER; note = 2'-O-methyl modified nucleotide
  modified_base 25: mod_base = OTHER; note = 2'-fluoro modified nucleotide
  modified_base 26: mod_base = OTHER; note = 2'-O-methyl modified nucleotide
  modified_base 27: mod_base = OTHER; note = 2'-fluoro modified nucleotide
  modified_base 28: mod_base = OTHER; note = 2'-O-methyl modified nucleotide
  modified_base 29: mod_base = OTHER; note = 2'-fluoro modified nucleotide
  modified_base 30: mod_base = OTHER; note = 2'-O-methyl modified nucleotide
  modified_base 31: mod_base = OTHER; note = 2'-fluoro modified nucleotide with phosphorothioate linkage
  modified_base 32: mod_base = OTHER; note = 2'-O-methyl modified nucleotide with phosphorothioate linkage
  misc_difference 33: note = 2'-fluoro modified nucleotide with phosphorothioate linkage may be attached to trivalent N-Acetylgalactosamine
tcaccatgaggtcaaagggtgacctcatggtga

SEQ ID NO: 961 - RNA, 33 nt, synthetic construct
  source 1..33: mol_type = other RNA
  misc_difference 1: note = 2'-O-methyl modified nucleotide with phosphorothioate linkage may be modified with 5'-Phosphate
  modified_base 2: mod_base = OTHER; note = 2'-fluoro modified nucleotide with phosphorothioate linkage
  modified_base 3: mod_base = OTHER; note = 2'-O-methyl modified nucleotide
  modified_base 4: mod_base = OTHER; note = 2'-fluoro modified nucleotide
  modified_base 5: mod_base = OTHER; note = 2'-O-methyl modified nucleotide
  modified_base 6: mod_base = OTHER; note = 2'-fluoro modified nucleotide
  modified_base 7: mod_base = OTHER; note = 2'-O-methyl modified nucleotide
  modified_base 8: mod_base = OTHER; note = 2'-fluoro modified nucleotide
  modified_base 9: mod_base = OTHER; note = 2'-O-methyl modified nucleotide
  modified_base 10: mod_base = OTHER; note = 2'-fluoro modified nucleotide
  modified_base 11: mod_base = OTHER; note = 2'-O-methyl modified nucleotide
  modified_base 12: mod_base = OTHER; note = 2'-fluoro modified nucleotide
  modified_base 13: mod_base = OTHER; note = 2'-O-methyl modified nucleotide
  modified_base 14: mod_base = OTHER; note = 2'-fluoro modified nucleotide with phosphorothioate linkage
  modified_base 15: mod_base = OTHER; note = 2'-O-methyl modified nucleotide with phosphorothioate linkage
  modified_base 16: mod_base = OTHER; note = 2'-fluoro modified nucleotide with phosphorothioate linkage
  modified_base 17: mod_base = OTHER; note = 2'-O-methyl modified nucleotide with phosphorothioate linkage
  modified_base 18: mod_base = OTHER; note = 2'-fluoro modified nucleotide with phosphorothioate linkage
  modified_base 19: mod_base = OTHER; note = 2'-O-methyl modified nucleotide with phosphorothioate linkage
  modified_base 20: mod_base = OTHER; note = 2'-O-methyl modified nucleotide
  modified_base 21: mod_base = OTHER; note = 2'-fluoro modified nucleotide
  modified_base 22: mod_base = OTHER; note = 2'-O-methyl modified nucleotide
  modified_base 23: mod_base = OTHER; note = 2'-fluoro modified nucleotide
  modified_base 24: mod_base = OTHER; note = 2'-O-methyl modified nucleotide
  modified_base 25: mod_base = OTHER; note = 2'-fluoro modified nucleotide
  modified_base 26: mod_base = OTHER; note = 2'-O-methyl modified nucleotide
  modified_base 27: mod_base = OTHER; note = 2'-fluoro modified nucleotide
  modified_base 28: mod_base = OTHER; note = 2'-O-methyl modified nucleotide
  modified_base 29: mod_base = OTHER; note = 2'-fluoro modified nucleotide
  modified_base 30: mod_base = OTHER; note = 2'-O-methyl modified nucleotide
  modified_base 31: mod_base = OTHER; note = 2'-fluoro modified nucleotide with phosphorothioate linkage
  modified_base 32: mod_base = OTHER; note = 2'-O-methyl modified nucleotide with phosphorothioate linkage
  misc_difference 33: note = 2'-fluoro modified nucleotide with phosphorothioate linkage may be attached to trivalent N-Acetylgalactosamine
taacaccatgaggtcaaagacctcatggtgtta

SEQ ID NO: 962 - RNA, 33 nt, synthetic construct
  source 1..33: mol_type = other RNA
  misc_difference 1: note = 2'-O-methyl modified nucleotide with phosphorothioate linkage may be modified with 5'-Phosphate
  modified_base 2: mod_base = OTHER; note = 2'-fluoro modified nucleotide with phosphorothioate linkage
  modified_base 3: mod_base = OTHER; note = 2'-O-methyl modified nucleotide
  modified_base 4: mod_base = OTHER; note = 2'-fluoro modified nucleotide
  modified_base 5: mod_base = OTHER; note = 2'-O-methyl modified nucleotide
  modified_base 6: mod_base = OTHER; note = 2'-fluoro modified nucleotide
  modified_base 7: mod_base = OTHER; note = 2'-O-methyl modified nucleotide
  modified_base 8: mod_base = OTHER; note = 2'-fluoro modified nucleotide
  modified_base 9: mod_base = OTHER; note = 2'-O-methyl modified nucleotide
  modified_base 10: mod_base = OTHER; note = 2'-fluoro modified nucleotide
  modified_base 11: mod_base = OTHER; note = 2'-O-methyl modified nucleotide
  modified_base 12: mod_base = OTHER; note = 2'-fluoro modified nucleotide
  modified_base 13: mod_base = OTHER; note = 2'-O-methyl modified nucleotide
  modified_base 14: mod_base = OTHER; note = 2'-fluoro modified nucleotide with phosphorothioate linkage
  modified_base 15: mod_base = OTHER; note = 2'-O-methyl modified nucleotide with phosphorothioate linkage
  modified_base 16: mod_base = OTHER; note = 2'-fluoro modified nucleotide with phosphorothioate linkage
  modified_base 17: mod_base = OTHER; note = 2'-O-methyl modified nucleotide with phosphorothioate linkage
  modified_base 18: mod_base = OTHER; note = 2'-fluoro modified nucleotide with phosphorothioate linkage
  modified_base 19: mod_base = OTHER; note = 2'-O-methyl modified nucleotide with phosphorothioate linkage
  modified_base 20: mod_base = OTHER; note = 2'-O-methyl modified nucleotide
  modified_base 21: mod_base = OTHER; note = 2'-fluoro modified nucleotide
  modified_base 22: mod_base = OTHER; note = 2'-O-methyl modified nucleotide
  modified_base 23: mod_base = OTHER; note = 2'-fluoro modified nucleotide
  modified_base 24: mod_base = OTHER; note = 2'-O-methyl modified nucleotide
  modified_base 25: mod_base = OTHER; note = 2'-fluoro modified nucleotide
  modified_base 26: mod_base = OTHER; note = 2'-O-methyl modified nucleotide
  modified_base 27: mod_base = OTHER; note = 2'-fluoro modified nucleotide
  modified_base 28: mod_base = OTHER; note = 2'-O-methyl modified nucleotide
  modified_base 29: mod_base = OTHER; note = 2'-fluoro modified nucleotide
  modified_base 30: mod_base = OTHER; note = 2'-O-methyl modified nucleotide
  modified_base 31: mod_base = OTHER; note = 2'-fluoro modified nucleotide with phosphorothioate linkage
  modified_base 32: mod_base = OTHER; note = 2'-O-methyl modified nucleotide with phosphorothioate linkage
  misc_difference 33: note = 2'-fluoro modified nucleotide with phosphorothioate linkage may be attached to trivalent N-Acetylgalactosamine
taagaccttgaccacgtagtggtcaaggtctta

SEQ ID NO: 963 - RNA, 33 nt, synthetic construct
  source 1..33: mol_type = other RNA
  misc_difference 1: note = 2'-O-methyl modified nucleotide with phosphorothioate linkage may be modified with 5'-Phosphate
  modified_base 2: mod_base = OTHER; note = 2'-fluoro modified nucleotide with phosphorothioate linkage
  modified_base 3: mod_base = OTHER; note = 2'-O-methyl modified nucleotide
  modified_base 4: mod_base = OTHER; note = 2'-fluoro modified nucleotide
  modified_base 5: mod_base = OTHER; note = 2'-O-methyl modified nucleotide
  modified_base 6: mod_base = OTHER; note = 2'-fluoro modified nucleotide
  modified_base 7: mod_base = OTHER; note = 2'-O-methyl modified nucleotide
  modified_base 8: mod_base = OTHER; note = 2'-fluoro modified nucleotide
  modified_base 9: mod_base = OTHER; note = 2'-O-methyl modified nucleotide
  modified_base 10: mod_base = OTHER; note = 2'-fluoro modified nucleotide
  modified_base 11: mod_base = OTHER; note = 2'-O-methyl modified nucleotide
  modified_base 12: mod_base = OTHER; note = 2'-fluoro modified nucleotide
  modified_base 13: mod_base = OTHER; note = 2'-O-methyl modified nucleotide
  modified_base 14: mod_base = OTHER; note = 2'-fluoro modified nucleotide with phosphorothioate linkage
  modified_base 15: mod_base = OTHER; note = 2'-O-methyl modified nucleotide with phosphorothioate linkage
  modified_base 16: mod_base = OTHER; note = 2'-fluoro modified nucleotide with phosphorothioate linkage
  modified_base 17: mod_base = OTHER; note = 2'-O-methyl modified nucleotide with phosphorothioate linkage
  modified_base 18: mod_base = OTHER; note = 2'-fluoro modified nucleotide with phosphorothioate linkage
  modified_base 19: mod_base = OTHER; note = 2'-O-methyl modified nucleotide with phosphorothioate linkage
  modified_base 20: mod_base = OTHER; note = 2'-O-methyl modified nucleotide
  modified_base 21: mod_base = OTHER; note = 2'-fluoro modified nucleotide
  modified_base 22: mod_base = OTHER; note = 2'-O-methyl modified nucleotide
  modified_base 23: mod_base = OTHER; note = 2'-fluoro modified nucleotide
  modified_base 24: mod_base = OTHER; note = 2'-O-methyl modified nucleotide
  modified_base 25: mod_base = OTHER; note = 2'-fluoro modified nucleotide
  modified_base 26: mod_base = OTHER; note = 2'-O-methyl modified nucleotide
  modified_base 27: mod_base = OTHER; note = 2'-fluoro modified nucleotide
  modified_base 28: mod_base = OTHER; note = 2'-O-methyl modified nucleotide
  modified_base 29: mod_base = OTHER; note = 2'-fluoro modified nucleotide
  modified_base 30: mod_base = OTHER; note = 2'-O-methyl modified nucleotide
  modified_base 31: mod_base = OTHER; note = 2'-fluoro modified nucleotide with phosphorothioate linkage
  modified_base 32: mod_base = OTHER; note = 2'-O-methyl modified nucleotide with phosphorothioate linkage
  misc_difference 33: note = 2'-fluoro modified nucleotide with phosphorothioate linkage may be attached to trivalent N-Acetylgalactosamine
tagaagaccttgaccacgtgtcaaggtcttcta

SEQ ID NO: 964 - RNA, 33 nt, synthetic construct
  source 1..33: mol_type = other RNA
  misc_difference 1: note = 2'-O-methyl modified nucleotide with phosphorothioate linkage may be modified with 5'-Phosphate
  modified_base 2: mod_base = OTHER; note = 2'-fluoro modified nucleotide with phosphorothioate linkage
  modified_base 3: mod_base = OTHER; note = 2'-O-methyl modified nucleotide
  modified_base 4: mod_base = OTHER; note = 2'-fluoro modified nucleotide
  modified_base 5: mod_base = OTHER; note = 2'-O-methyl modified nucleotide
  modified_base 6: mod_base = OTHER; note = 2'-fluoro modified nucleotide
  modified_base 7: mod_base = OTHER; note = 2'-O-methyl modified nucleotide
  modified_base 8: mod_base = OTHER; note = 2'-fluoro modified nucleotide
  modified_base 9: mod_base = OTHER; note = 2'-O-methyl modified nucleotide
  modified_base 10: mod_base = OTHER; note = 2'-fluoro modified nucleotide
  modified_base 11: mod_base = OTHER; note = 2'-O-methyl modified nucleotide
  modified_base 12: mod_base = OTHER; note = 2'-fluoro modified nucleotide
  modified_base 13: mod_base = OTHER; note = 2'-O-methyl modified nucleotide
  modified_base 14: mod_base = OTHER; note = 2'-fluoro modified nucleotide with phosphorothioate linkage
  modified_base 15: mod_base = OTHER; note = 2'-O-methyl modified nucleotide with phosphorothioate linkage
  modified_base 16: mod_base = OTHER; note = 2'-fluoro modified nucleotide with phosphorothioate linkage
  modified_base 17: mod_base = OTHER; note = 2'-O-methyl modified nucleotide with phosphorothioate linkage
  modified_base 18: mod_base = OTHER; note = 2'-fluoro modified nucleotide with phosphorothioate linkage
  modified_base 19: mod_base = OTHER; note = 2'-O-methyl modified nucleotide with phosphorothioate linkage
  modified_base 20: mod_base = OTHER; note = 2'-O-methyl modified nucleotide
  modified_base 21: mod_base = OTHER; note = 2'-fluoro modified nucleotide
  modified_base 22: mod_base = OTHER; note = 2'-O-methyl modified nucleotide
  modified_base 23: mod_base = OTHER; note = 2'-fluoro modified nucleotide
  modified_base 24: mod_base = OTHER; note = 2'-O-methyl modified nucleotide
  modified_base 25: mod_base = OTHER; note = 2'-fluoro modified nucleotide
  modified_base 26: mod_base = OTHER; note = 2'-O-methyl modified nucleotide
  modified_base 27: mod_base = OTHER; note = 2'-fluoro modified nucleotide
  modified_base 28: mod_base = OTHER; note = 2'-O-methyl modified nucleotide
  modified_base 29: mod_base = OTHER; note = 2'-fluoro modified nucleotide
  modified_base 30: mod_base = OTHER; note = 2'-O-methyl modified nucleotide
  modified_base 31: mod_base = OTHER; note = 2'-fluoro modified nucleotide with phosphorothioate linkage
  modified_base 32: mod_base = OTHER; note = 2'-O-methyl modified nucleotide with phosphorothioate linkage
  misc_difference 33: note = 2'-fluoro modified nucleotide with phosphorothioate linkage may be attached to trivalent N-Acetylgalactosamine
tggtcttgtacacatagtctgtgtacaagacca

SEQ ID NO: 965 - RNA, 33 nt, synthetic construct
  source 1..33: mol_type = other RNA
  misc_difference 1: note = 2'-O-methyl modified nucleotide with phosphorothioate linkage may be modified with 5'-Phosphate
  modified_base 2: mod_base = OTHER; note = 2'-fluoro modified nucleotide with phosphorothioate linkage
  modified_base 3: mod_base = OTHER; note = 2'-O-methyl modified nucleotide
  modified_base 4: mod_base = OTHER; note = 2'-fluoro modified nucleotide
  modified_base 5: mod_base = OTHER; note = 2'-O-methyl modified nucleotide
  modified_base 6: mod_base = OTHER; note = 2'-fluoro modified nucleotide
  modified_base 7: mod_base = OTHER; note = 2'-O-methyl modified nucleotide
  modified_base 8: mod_base = OTHER; note = 2'-fluoro modified nucleotide
  modified_base 9: mod_base = OTHER; note = 2'-O-methyl modified nucleotide
  modified_base 10: mod_base = OTHER; note = 2'-fluoro modified nucleotide
  modified_base 11: mod_base = OTHER; note = 2'-O-methyl modified nucleotide
  modified_base 12: mod_base = OTHER; note = 2'-fluoro modified nucleotide
  modified_base 13: mod_base = OTHER; note = 2'-O-methyl modified nucleotide
  modified_base 14: mod_base = OTHER; note = 2'-fluoro modified nucleotide with phosphorothioate linkage
  modified_base 15: mod_base = OTHER; note = 2'-O-methyl modified nucleotide with phosphorothioate linkage
  modified_base 16: mod_base = OTHER; note = 2'-fluoro modified nucleotide with phosphorothioate linkage
  modified_base 17: mod_base = OTHER; note = 2'-O-methyl modified nucleotide with phosphorothioate linkage
  modified_base 18: mod_base = OTHER; note = 2'-fluoro modified nucleotide with phosphorothioate linkage
  modified_base 19: mod_base = OTHER; note = 2'-O-methyl modified nucleotide with phosphorothioate linkage
  modified_base 20: mod_base = OTHER; note = 2'-O-methyl modified nucleotide
  modified_base 21: mod_base = OTHER; note = 2'-fluoro modified nucleotide
  modified_base 22: mod_base = OTHER; note = 2'-O-methyl modified nucleotide
  modified_base 23: mod_base = OTHER; note = 2'-fluoro modified nucleotide
  modified_base 24: mod_base = OTHER; note = 2'-O-methyl modified nucleotide
  modified_base 25: mod_base = OTHER; note = 2'-fluoro modified nucleotide
  modified_base 26: mod_base = OTHER; note = 2'-O-methyl modified nucleotide
  modified_base 27: mod_base = OTHER; note = 2'-fluoro modified nucleotide
  modified_base 28: mod_base = OTHER; note = 2'-O-methyl modified nucleotide
  modified_base 29: mod_base = OTHER; note = 2'-fluoro modified nucleotide
  modified_base 30: mod_base = OTHER; note = 2'-O-methyl modified nucleotide
  modified_base 31: mod_base = OTHER; note = 2'-fluoro modified nucleotide with phosphorothioate linkage
  modified_base 32: mod_base = OTHER; note = 2'-O-methyl modified nucleotide with phosphorothioate linkage
  misc_difference 33: note = 2'-fluoro modified nucleotide with phosphorothioate linkage may be attached to trivalent N-Acetylgalactosamine
tccatgaggtcaaagggcatttgacctcatgga

SEQ ID NO: 966 - RNA, 33 nt, synthetic construct
  source 1..33: mol_type = other RNA
  misc_difference 1: note = 2'-O-methyl modified nucleotide with phosphorothioate linkage may be modified with 5'-Phosphate
  modified_base 2: mod_base = OTHER; note = 2'-fluoro modified nucleotide with phosphorothioate linkage
  modified_base 3: mod_base = OTHER; note = 2'-O-methyl modified nucleotide
  modified_base 4: mod_base = OTHER; note = 2'-fluoro modified nucleotide
  modified_base 5: mod_base = OTHER; note = 2'-O-methyl modified nucleotide
  modified_base 6: mod_base = OTHER; note = 2'-fluoro modified nucleotide
  modified_base 7: mod_base = OTHER; note = 2'-O-methyl modified nucleotide
  modified_base 8: mod_base = OTHER; note = 2'-fluoro modified nucleotide
  modified_base 9: mod_base = OTHER; note = 2'-O-methyl modified nucleotide
  modified_base 10: mod_base = OTHER; note = 2'-fluoro modified nucleotide
  modified_base 11: mod_base = OTHER; note = 2'-O-methyl modified nucleotide
  modified_base 12: mod_base = OTHER; note = 2'-fluoro modified nucleotide
  modified_base 13: mod_base = OTHER; note = 2'-O-methyl modified nucleotide
  modified_base 14: mod_base = OTHER; note = 2'-fluoro modified nucleotide with phosphorothioate linkage
  modified_base 15: mod_base = OTHER; note = 2'-O-methyl modified nucleotide with phosphorothioate linkage
  modified_base 16: mod_base = OTHER; note = 2'-fluoro modified nucleotide with phosphorothioate linkage
  modified_base 17: mod_base = OTHER; note = 2'-O-methyl modified nucleotide with phosphorothioate linkage
  modified_base 18: mod_base = OTHER; note = 2'-fluoro modified nucleotide with phosphorothioate linkage
  modified_base 19: mod_base = OTHER; note = 2'-O-methyl modified nucleotide with phosphorothioate linkage
  modified_base 20: mod_base = OTHER; note = 2'-O-methyl modified nucleotide
  modified_base 21: mod_base = OTHER; note = 2'-fluoro modified nucleotide
  modified_base 22: mod_base = OTHER; note = 2'-O-methyl modified nucleotide
  modified_base 23: mod_base = OTHER; note = 2'-fluoro modified nucleotide
  modified_base 24: mod_base = OTHER; note = 2'-O-methyl modified nucleotide
  modified_base 25: mod_base = OTHER; note = 2'-fluoro modified nucleotide
  modified_base 26: mod_base = OTHER; note = 2'-O-methyl modified nucleotide
  modified_base 27: mod_base = OTHER; note = 2'-fluoro modified nucleotide
  modified_base 28: mod_base = OTHER; note = 2'-O-methyl modified nucleotide
  modified_base 29: mod_base = OTHER; note = 2'-fluoro modified nucleotide
  modified_base 30: mod_base = OTHER; note = 2'-O-methyl modified nucleotide
  modified_base 31: mod_base = OTHER; note = 2'-fluoro modified nucleotide with phosphorothioate linkage
  modified_base 32: mod_base = OTHER; note = 2'-O-methyl modified nucleotide with phosphorothioate linkage
  misc_difference 33: note = 2'-fluoro modified nucleotide with phosphorothioate linkage may be attached to trivalent N-Acetylgalactosamine
tcatgaggtcaaagggcatctttgacctcatga

SEQ ID NO: 967 - RNA, 33 nt, synthetic construct
  source 1..33: mol_type = other RNA
  misc_difference 1: note = 2'-O-methyl modified nucleotide with phosphorothioate linkage may be modified with 5'-Phosphate
  modified_base 2: mod_base = OTHER; note = 2'-fluoro modified nucleotide with phosphorothioate linkage
  modified_base 3: mod_base = OTHER; note = 2'-O-methyl modified nucleotide
  modified_base 4: mod_base = OTHER; note = 2'-fluoro modified nucleotide
  modified_base 5: mod_base = OTHER; note = 2'-O-methyl modified nucleotide
  modified_base 6: mod_base = OTHER; note = 2'-fluoro modified nucleotide
  modified_base 7: mod_base = OTHER; note = 2'-O-methyl modified nucleotide
  modified_base 8: mod_base = OTHER; note = 2'-fluoro modified nucleotide
  modified_base 9: mod_base = OTHER; note = 2'-O-methyl modified nucleotide
  modified_base 10: mod_base = OTHER; note = 2'-fluoro modified nucleotide
  modified_base 11: mod_base = OTHER; note = 2'-O-methyl modified nucleotide
  modified_base 12: mod_base = OTHER; note = 2'-fluoro modified nucleotide
  modified_base 13: mod_base = OTHER; note = 2'-O-methyl modified nucleotide
  modified_base 14: mod_base = OTHER; note = 2'-fluoro modified nucleotide with phosphorothioate linkage
  modified_base 15: mod_base = OTHER; note = 2'-O-methyl modified nucleotide with phosphorothioate linkage
  modified_base 16: mod_base = OTHER; note = 2'-fluoro modified nucleotide with phosphorothioate linkage
  modified_base 17: mod_base = OTHER; note = 2'-O-methyl modified nucleotide with phosphorothioate linkage
  modified_base 18: mod_base = OTHER; note = 2'-fluoro modified nucleotide with phosphorothioate linkage
  modified_base 19: mod_base = OTHER; note = 2'-O-methyl modified nucleotide with phosphorothioate linkage
  modified_base 20: mod_base = OTHER; note = 2'-O-methyl modified nucleotide
  modified_base 21: mod_base = OTHER; note = 2'-fluoro modified nucleotide
  modified_base 22: mod_base = OTHER; note = 2'-O-methyl modified nucleotide
  modified_base 23: mod_base = OTHER; note = 2'-fluoro modified nucleotide
  modified_base 24: mod_base = OTHER; note = 2'-O-methyl modified nucleotide
  modified_base 25: mod_base = OTHER; note = 2'-fluoro modified nucleotide
  modified_base 26: mod_base = OTHER; note = 2'-O-methyl modified nucleotide
  modified_base 27: mod_base = OTHER; note = 2'-fluoro modified nucleotide
  modified_base 28: mod_base = OTHER; note = 2'-O-methyl modified nucleotide
  modified_base 29: mod_base = OTHER; note = 2'-fluoro modified nucleotide
  modified_base 30: mod_base = OTHER; note = 2'-O-methyl modified nucleotide
  modified_base 31: mod_base = OTHER; note = 2'-fluoro modified nucleotide with phosphorothioate linkage
  modified_base 32: mod_base = OTHER; note = 2'-O-methyl modified nucleotide with phosphorothioate linkage
  misc_difference 33: note = 2'-fluoro modified nucleotide with phosphorothioate linkage may be attached to trivalent N-Acetylgalactosamine
tggagaattctggtctcagaccagaattctcca

SEQ ID NO: 968 - RNA, 33 nt, synthetic construct; identical to SEQ ID NO: 518
  source 1..33: mol_type = other RNA
  misc_difference 1: note = 2'-O-methyl modified nucleotide with phosphorothioate linkage may be modified with 5'-Phosphate
  modified_base 2: mod_base = OTHER; note = 2'-fluoro modified nucleotide with phosphorothioate linkage
  modified_base 3: mod_base = OTHER; note = 2'-O-methyl modified nucleotide
  modified_base 4: mod_base = OTHER; note = 2'-fluoro modified nucleotide
  modified_base 5: mod_base = OTHER; note = 2'-O-methyl modified nucleotide
  modified_base 6: mod_base = OTHER; note = 2'-fluoro modified nucleotide
  modified_base 7: mod_base = OTHER; note = 2'-O-methyl modified nucleotide
  modified_base 8: mod_base = OTHER; note = 2'-fluoro modified nucleotide
  modified_base 9: mod_base = OTHER; note = 2'-O-methyl modified nucleotide
  modified_base 10: mod_base = OTHER; note = 2'-fluoro modified nucleotide
  modified_base 11: mod_base = OTHER; note = 2'-O-methyl modified nucleotide
  modified_base 12: mod_base = OTHER; note = 2'-fluoro modified nucleotide
  modified_base 13: mod_base = OTHER; note = 2'-O-methyl modified nucleotide
  modified_base 14: mod_base = OTHER; note = 2'-fluoro modified nucleotide with phosphorothioate linkage
  modified_base 15: mod_base = OTHER; note = 2'-O-methyl modified nucleotide with phosphorothioate linkage
  modified_base 16: mod_base = OTHER; note = 2'-fluoro modified nucleotide with phosphorothioate linkage
  modified_base 17: mod_base = OTHER; note = 2'-O-methyl modified nucleotide with phosphorothioate linkage
  modified_base 18: mod_base = OTHER; note = 2'-fluoro modified nucleotide with phosphorothioate linkage
  modified_base 19: mod_base = OTHER; note = 2'-O-methyl modified nucleotide with phosphorothioate linkage
  modified_base 20: mod_base = OTHER; note = 2'-O-methyl modified nucleotide
  modified_base 21: mod_base = OTHER; note = 2'-fluoro modified nucleotide
  modified_base 22: mod_base = OTHER; note = 2'-O-methyl modified nucleotide
  modified_base 23: mod_base = OTHER; note = 2'-fluoro modified nucleotide
  modified_base 24: mod_base = OTHER; note = 2'-O-methyl modified nucleotide
  modified_base 25: mod_base = OTHER; note = 2'-fluoro modified nucleotide
  modified_base 26: mod_base = OTHER; note = 2'-O-methyl modified nucleotide
  modified_base 27: mod_base = OTHER; note = 2'-fluoro modified nucleotide
  modified_base 28: mod_base = OTHER; note = 2'-O-methyl modified nucleotide
  modified_base 29: mod_base = OTHER; note = 2'-fluoro modified nucleotide
  modified_base 30: mod_base = OTHER; note = 2'-O-methyl modified nucleotide
  modified_base 31: mod_base = OTHER; note = 2'-fluoro modified nucleotide with phosphorothioate linkage
  modified_base 32: mod_base = OTHER; note = 2'-O-methyl modified nucleotide with phosphorothioate linkage
  misc_difference 33: note = 2'-fluoro modified nucleotide with phosphorothioate linkage may be attached to trivalent N-Acetylgalactosamine

SEQ ID NO: 969 - RNA, 33 nt, synthetic construct
  source 1..33: mol_type = other RNA
  misc_difference 1: note = 2'-O-methyl modified nucleotide with phosphorothioate linkage may be modified with 5'-Phosphate
  modified_base 2: mod_base = OTHER; note = 2'-fluoro modified nucleotide with phosphorothioate linkage
  modified_base 3: mod_base = OTHER; note = 2'-O-methyl modified nucleotide
  modified_base 4: mod_base = OTHER; note = 2'-fluoro modified nucleotide
  modified_base 5: mod_base = OTHER; note = 2'-O-methyl modified nucleotide
  modified_base 6: mod_base = OTHER; note = 2'-fluoro modified nucleotide
  modified_base 7: mod_base = OTHER; note = 2'-O-methyl modified nucleotide
  modified_base 8: mod_base = OTHER; note = 2'-fluoro modified nucleotide
  modified_base 9: mod_base = OTHER; note = 2'-O-methyl modified nucleotide
  modified_base 10: mod_base = OTHER; note = 2'-fluoro modified nucleotide
  modified_base 11: mod_base = OTHER; note = 2'-O-methyl modified nucleotide
  modified_base 12: mod_base = OTHER; note = 2'-fluoro modified nucleotide
  modified_base 13: mod_base = OTHER; note = 2'-O-methyl modified nucleotide
  modified_base 14: mod_base = OTHER; note = 2'-fluoro modified nucleotide with phosphorothioate linkage
  modified_base 15: mod_base = OTHER; note = 2'-O-methyl modified nucleotide with phosphorothioate linkage
  modified_base 16: mod_base = OTHER; note = 2'-fluoro modified nucleotide with phosphorothioate linkage
  modified_base 17: mod_base = OTHER; note = 2'-O-methyl modified nucleotide with phosphorothioate linkage
  modified_base 18: mod_base = OTHER; note = 2'-fluoro modified nucleotide with phosphorothioate linkage
  modified_base 19: mod_base = OTHER; note = 2'-O-methyl modified nucleotide with phosphorothioate linkage
  modified_base 20: mod_base = OTHER; note = 2'-O-methyl modified nucleotide
  modified_base 21: mod_base = OTHER; note = 2'-fluoro modified nucleotide
  modified_base 22: mod_base = OTHER; note = 2'-O-methyl modified nucleotide
  modified_base 23: mod_base = OTHER; note = 2'-fluoro modified nucleotide
  modified_base 24: mod_base = OTHER; note = 2'-O-methyl modified nucleotide
  modified_base 25: mod_base = OTHER; note = 2'-fluoro modified nucleotide
  modified_base 26: mod_base = OTHER; note = 2'-O-methyl modified nucleotide
  modified_base 27: mod_base = OTHER; note = 2'-fluoro modified nucleotide
  modified_base 28: mod_base = OTHER; note = 2'-O-methyl modified nucleotide
  modified_base 29: mod_base = OTHER; note = 2'-fluoro modified nucleotide
  modified_base 30: mod_base = OTHER; note = 2'-O-methyl modified nucleotide
  modified_base 31: mod_base = OTHER; note = 2'-fluoro modified nucleotide with phosphorothioate linkage
  modified_base 32: mod_base = OTHER; note = 2'-O-methyl modified nucleotide with phosphorothioate linkage
  misc_difference 33: note = 2'-fluoro modified nucleotide with phosphorothioate linkage may be attached to trivalent N-Acetylgalactosamine
tcagccagagagaagacctttctctctggctga

SEQ ID NO: 970 - RNA, 33 nt, synthetic construct
  source 1..33: mol_type = other RNA
  misc_difference 1: note = 2'-O-methyl modified nucleotide with phosphorothioate linkage may be modified with 5'-Phosphate
  modified_base 2: mod_base = OTHER; note = 2'-fluoro modified nucleotide with phosphorothioate linkage
  modified_base 3: mod_base = OTHER; note = 2'-O-methyl modified nucleotide
  modified_base 4: mod_base = OTHER; note = 2'-fluoro modified nucleotide
  modified_base 5: mod_base = OTHER; note = 2'-O-methyl modified nucleotide
  modified_base 6: mod_base = OTHER; note = 2'-fluoro modified nucleotide
  modified_base 7: mod_base = OTHER; note = 2'-O-methyl modified nucleotide
  modified_base 8: mod_base = OTHER; note = 2'-fluoro modified nucleotide
  modified_base 9: mod_base = OTHER; note = 2'-O-methyl modified nucleotide
  modified_base 10: mod_base = OTHER; note = 2'-fluoro modified nucleotide
  modified_base 11: mod_base = OTHER; note = 2'-O-methyl modified nucleotide
  modified_base 12: mod_base = OTHER; note = 2'-fluoro modified nucleotide
  modified_base 13: mod_base = OTHER; note = 2'-O-methyl modified nucleotide
  modified_base 14: mod_base = OTHER; note = 2'-fluoro modified nucleotide with phosphorothioate linkage
  modified_base 15: mod_base = OTHER; note = 2'-O-methyl modified nucleotide with phosphorothioate linkage
  modified_base 16: mod_base = OTHER; note = 2'-fluoro modified nucleotide with phosphorothioate linkage
  modified_base 17: mod_base = OTHER; note = 2'-O-methyl modified nucleotide with phosphorothioate linkage
  modified_base 18: mod_base = OTHER; note = 2'-fluoro modified nucleotide with phosphorothioate linkage
  modified_base 19: mod_base = OTHER; note = 2'-O-methyl modified nucleotide with phosphorothioate linkage
  modified_base 20: mod_base = OTHER; note = 2'-O-methyl modified nucleotide
  modified_base 21: mod_base = OTHER; note = 2'-fluoro modified nucleotide
  modified_base 22: mod_base = OTHER; note = 2'-O-methyl modified nucleotide
  modified_base 23: mod_base = OTHER; note = 2'-fluoro modified nucleotide
  modified_base 24: mod_base = OTHER; note = 2'-O-methyl modified nucleotide
  modified_base 25: mod_base = OTHER; note = 2'-fluoro modified nucleotide
  modified_base 26: mod_base = OTHER; note = 2'-O-methyl modified nucleotide
  modified_base 27: mod_base = OTHER; note = 2'-fluoro modified nucleotide
  modified_base 28: mod_base = OTHER; note = 2'-O-methyl modified nucleotide
  modified_base 29: mod_base = OTHER; note = 2'-fluoro modified nucleotide
  modified_base 30: mod_base = OTHER; note = 2'-O-methyl modified nucleotide
  modified_base 31: mod_base = OTHER; note = 2'-fluoro modified nucleotide with phosphorothioate linkage
  modified_base 32: mod_base = OTHER; note = 2'-O-methyl modified nucleotide with phosphorothioate linkage
  misc_difference 33: note = 2'-fluoro modified nucleotide with phosphorothioate linkage may be attached to trivalent N-Acetylgalactosamine
tgaaactgggcagcacgtagctgcccagtttca

SEQ ID NO: 971 - RNA, 33 nt, synthetic construct
  source 1..33: mol_type = other RNA
  misc_difference 1: note = 2'-O-methyl modified nucleotide with phosphorothioate linkage may be modified with 5'-Phosphate
  modified_base 2: mod_base = OTHER; note = 2'-fluoro modified nucleotide with phosphorothioate linkage
  modified_base 3: mod_base = OTHER; note = 2'-O-methyl modified nucleotide
  modified_base 4: mod_base = OTHER; note = 2'-fluoro modified nucleotide
  modified_base 5: mod_base = OTHER; note = 2'-O-methyl modified nucleotide
  modified_base 6: mod_base = OTHER; note = 2'-fluoro modified nucleotide
  modified_base 7: mod_base = OTHER; note = 2'-O-methyl modified nucleotide
  modified_base 8: mod_base = OTHER; note = 2'-fluoro modified nucleotide
  modified_base 9: mod_base = OTHER; note = 2'-O-methyl modified nucleotide
  modified_base 10: mod_base = OTHER; note = 2'-fluoro modified nucleotide
  modified_base 11: mod_base = OTHER; note = 2'-O-methyl modified nucleotide
  modified_base 12: mod_base = OTHER; note = 2'-fluoro modified nucleotide
  modified_base 13: mod_base = OTHER; note = 2'-O-methyl modified nucleotide
  modified_base 14: mod_base = OTHER; note = 2'-fluoro modified nucleotide with phosphorothioate linkage
  modified_base 15: mod_base = OTHER; note = 2'-O-methyl modified nucleotide with phosphorothioate linkage
  modified_base 16: mod_base = OTHER; note = 2'-fluoro modified nucleotide with phosphorothioate linkage
  modified_base 17: mod_base = OTHER; note = 2'-O-methyl modified nucleotide with phosphorothioate linkage
  modified_base 18: mod_base = OTHER; note = 2'-fluoro modified nucleotide with phosphorothioate linkage
  modified_base 19: mod_base = OTHER; note = 2'-O-methyl modified nucleotide with phosphorothioate linkage
  modified_base 20: mod_base = OTHER; note = 2'-O-methyl modified nucleotide
  modified_base 21: mod_base = OTHER; note = 2'-fluoro modified nucleotide
  modified_base 22: mod_base = OTHER; note = 2'-O-methyl modified nucleotide
  modified_base 23: mod_base = OTHER; note = 2'-fluoro modified nucleotide
  modified_base 24: mod_base = OTHER; note = 2'-O-methyl modified nucleotide
  modified_base 25: mod_base = OTHER; note = 2'-fluoro modified nucleotide
  modified_base 26: mod_base = OTHER; note = 2'-O-methyl modified nucleotide
  modified_base 27: mod_base = OTHER; note = 2'-fluoro modified nucleotide
  modified_base 28: mod_base = OTHER; note = 2'-O-methyl modified nucleotide
  modified_base 29: mod_base = OTHER; note = 2'-fluoro modified nucleotide
  modified_base 30: mod_base = OTHER; note = 2'-O-methyl modified nucleotide
  modified_base 31: mod_base = OTHER; note = 2'-fluoro modified nucleotide with phosphorothioate linkage
  modified_base 32: mod_base = OTHER; note = 2'-O-methyl modified nucleotide with phosphorothioate linkage
  misc_difference 33: note = 2'-fluoro modified nucleotide with phosphorothioate linkage may be attached to trivalent N-Acetylgalactosamine
tatttctctgtaggctccacctacagagaaata

SEQ ID NO: 972 - RNA, 33 nt, synthetic construct
  source 1..33: mol_type = other RNA
  misc_difference 1: note = 2'-O-methyl modified nucleotide with phosphorothioate linkage may be modified with 5'-Phosphate
  modified_base 2: mod_base = OTHER; note = 2'-fluoro modified nucleotide with phosphorothioate linkage
  modified_base 3: mod_base = OTHER; note = 2'-O-methyl modified nucleotide
  modified_base 4: mod_base = OTHER; note = 2'-fluoro modified nucleotide
  modified_base 5: mod_base = OTHER; note = 2'-O-methyl modified nucleotide
  modified_base 6: mod_base = OTHER; note = 2'-fluoro modified nucleotide
  modified_base 7: mod_base = OTHER; note = 2'-O-methyl modified nucleotide
  modified_base 8: mod_base = OTHER; note = 2'-fluoro modified nucleotide
  modified_base 9: mod_base = OTHER; note = 2'-O-methyl modified nucleotide
  modified_base 10: mod_base = OTHER; note = 2'-fluoro modified nucleotide
  modified_base 11: mod_base = OTHER; note = 2'-O-methyl modified nucleotide
  modified_base 12: mod_base = OTHER; note = 2'-fluoro modified nucleotide
  modified_base 13: mod_base = OTHER; note = 2'-O-methyl modified nucleotide
  modified_base 14: mod_base = OTHER; note = 2'-fluoro modified nucleotide with phosphorothioate linkage
  modified_base 15: mod_base = OTHER; note = 2'-O-methyl modified nucleotide with phosphorothioate linkage
  modified_base 16: mod_base = OTHER; note = 2'-fluoro modified nucleotide with phosphorothioate linkage
  modified_base 17: mod_base = OTHER; note = 2'-O-methyl modified nucleotide with phosphorothioate linkage
  modified_base 18: mod_base = OTHER; note = 2'-fluoro modified nucleotide with phosphorothioate linkage
  modified_base 19: mod_base = OTHER; note = 2'-O-methyl modified nucleotide with phosphorothioate linkage
  modified_base 20: mod_base = OTHER; note = 2'-O-methyl modified nucleotide
  modified_base 21: mod_base = OTHER; note = 2'-fluoro modified nucleotide
  modified_base 22: mod_base = OTHER; note = 2'-O-methyl modified nucleotide
  modified_base 23: mod_base = OTHER; note = 2'-fluoro modified nucleotide
  modified_base 24: mod_base = OTHER; note = 2'-O-methyl modified nucleotide
  modified_base 25: mod_base = OTHER; note = 2'-fluoro modified nucleotide
  modified_base 26: mod_base = OTHER; note = 2'-O-methyl modified nucleotide
  modified_base 27: mod_base = OTHER; note = 2'-fluoro modified nucleotide
  modified_base 28: mod_base = OTHER; note = 2'-O-methyl modified nucleotide
  modified_base 29: mod_base = OTHER; note = 2'-fluoro modified nucleotide
  modified_base 30: mod_base = OTHER; note = 2'-O-methyl modified nucleotide
  modified_base 31: mod_base = OTHER; note = 2'-fluoro modified nucleotide with phosphorothioate linkage
  modified_base 32: mod_base = OTHER; note = 2'-O-methyl modified nucleotide with phosphorothioate linkage
  misc_difference 33: note = 2'-fluoro modified nucleotide with phosphorothioate linkage may be attached to trivalent N-Acetylgalactosamine
ttgccttggccttttccttaaaggccaaggcaa

SEQ ID NO: 973 - RNA, 33 nt, synthetic construct
  source 1..33: mol_type = other RNA
  misc_difference 1: note = 2'-O-methyl modified nucleotide with phosphorothioate linkage may be modified with 5'-Phosphate
  modified_base 2: mod_base = OTHER; note = 2'-fluoro modified nucleotide with phosphorothioate linkage
  modified_base 3: mod_base = OTHER; note = 2'-O-methyl modified nucleotide
  modified_base 4: mod_base = OTHER; note = 2'-fluoro modified nucleotide
  modified_base 5: mod_base = OTHER; note = 2'-O-methyl modified nucleotide
  modified_base 6: mod_base = OTHER; note = 2'-fluoro modified nucleotide
  modified_base 7: mod_base = OTHER; note = 2'-O-methyl modified nucleotide
  modified_base 8: mod_base = OTHER; note = 2'-fluoro modified nucleotide
  modified_base 9: mod_base = OTHER; note = 2'-O-methyl modified nucleotide
  modified_base 10: mod_base = OTHER; note = 2'-fluoro modified nucleotide
  modified_base 11: mod_base = OTHER; note = 2'-O-methyl modified nucleotide
  modified_base 12: mod_base = OTHER; note = 2'-fluoro modified nucleotide
  modified_base 13: mod_base = OTHER; note = 2'-O-methyl modified nucleotide
  modified_base 14: mod_base = OTHER; note = 2'-fluoro modified nucleotide with phosphorothioate linkage
  modified_base 15: mod_base = OTHER; note = 2'-O-methyl modified nucleotide with phosphorothioate linkage
  modified_base 16: mod_base = OTHER; note = 2'-fluoro modified nucleotide with phosphorothioate linkage
  modified_base 17: mod_base = OTHER; note = 2'-O-methyl modified nucleotide with phosphorothioate linkage
  modified_base 18: mod_base = OTHER; note = 2'-fluoro modified nucleotide with phosphorothioate linkage
  modified_base 19: mod_base = OTHER; note = 2'-O-methyl modified nucleotide with phosphorothioate linkage
  modified_base 20: mod_base = OTHER; note = 2'-O-methyl modified nucleotide
  modified_base 21: mod_base = OTHER; note = 2'-fluoro modified nucleotide
  modified_base 22: mod_base = OTHER; note = 2'-O-methyl modified nucleotide
  modified_base 23: mod_base = OTHER; note = 2'-fluoro modified nucleotide
  modified_base 24: mod_base = OTHER; note = 2'-O-methyl modified nucleotide
  modified_base 25: mod_base = OTHER; note = 2'-fluoro modified nucleotide
  modified_base 26: mod_base = OTHER; note = 2'-O-methyl modified nucleotide
  modified_base 27: mod_base = OTHER; note = 2'-fluoro modified nucleotide
  modified_base 28: mod_base = OTHER; note = 2'-O-methyl modified nucleotide
  modified_base 29: mod_base = OTHER; note = 2'-fluoro modified nucleotide
  modified_base 30: mod_base = OTHER; note = 2'-O-methyl modified nucleotide
  modified_base 31: mod_base = OTHER; note = 2'-fluoro modified nucleotide with phosphorothioate linkage
  modified_base 32: mod_base = OTHER; note = 2'-O-methyl modified nucleotide with phosphorothioate linkage
  misc_difference 33: note = 2'-fluoro modified nucleotide with phosphorothioate linkage may be attached to trivalent N-Acetylgalactosamine
tcagagagaagaccttgacggtcttctctctga

SEQ ID NO: 974 - RNA, 33 nt, synthetic construct
  source 1..33: mol_type = other RNA
  misc_difference 1: note = 2'-O-methyl modified nucleotide with phosphorothioate linkage may be modified with 5'-Phosphate
  modified_base 2: mod_base = OTHER; note = 2'-fluoro modified nucleotide with phosphorothioate linkage
  modified_base 3: mod_base = OTHER; note = 2'-O-methyl modified nucleotide
  modified_base 4: mod_base = OTHER; note = 2'-fluoro modified nucleotide
  modified_base 5: mod_base = OTHER; note = 2'-O-methyl modified nucleotide
  modified_base 6: mod_base = OTHER; note = 2'-fluoro modified nucleotide
  modified_base 7: mod_base = OTHER; note = 2'-O-methyl modified nucleotide
  modified_base 8: mod_base = OTHER; note = 2'-fluoro modified nucleotide
  modified_base 9: mod_base = OTHER; note = 2'-O-methyl modified nucleotide
  modified_base 10: mod_base = OTHER; note = 2'-fluoro modified nucleotide
  modified_base 11: mod_base = OTHER; note = 2'-O-methyl modified nucleotide
  modified_base 12: mod_base = OTHER; note = 2'-fluoro modified nucleotide
  modified_base 13: mod_base = OTHER; note = 2'-O-methyl modified nucleotide
  modified_base 14: mod_base = OTHER; note = 2'-fluoro modified nucleotide with phosphorothioate linkage
  modified_base 15: mod_base = OTHER; note = 2'-O-methyl modified nucleotide with phosphorothioate linkage
  modified_base 16: mod_base = OTHER; note = 2'-fluoro modified nucleotide with phosphorothioate linkage
  modified_base 17: mod_base = OTHER; note = 2'-O-methyl modified nucleotide with phosphorothioate linkage
  modified_base 18: mod_base = OTHER; note = 2'-fluoro modified nucleotide with phosphorothioate linkage
  modified_base 19: mod_base = OTHER; note = 2'-O-methyl modified nucleotide with phosphorothioate linkage
  modified_base 20: mod_base = OTHER; note = 2'-O-methyl modified nucleotide
  modified_base 21: mod_base = OTHER; note = 2'-fluoro modified nucleotide
  modified_base 22: mod_base = OTHER; note = 2'-O-methyl modified nucleotide
  modified_base 23: mod_base = OTHER; note = 2'-fluoro modified nucleotide
  modified_base 24: mod_base = OTHER; note = 2'-O-methyl modified nucleotide
  modified_base 25: mod_base = OTHER; note = 2'-fluoro modified nucleotide
  modified_base 26: mod_base = OTHER; note = 2'-O-methyl modified nucleotide
  modified_base 27: mod_base = OTHER; note = 2'-fluoro modified nucleotide
  modified_base 28: mod_base = OTHER; note = 2'-O-methyl modified nucleotide
  modified_base 29: mod_base = OTHER; note = 2'-fluoro modified nucleotide
  modified_base 30: mod_base = OTHER; note = 2'-O-methyl modified nucleotide
  modified_base 31: mod_base = OTHER; note = 2'-fluoro modified nucleotide with phosphorothioate linkage
  modified_base 32: mod_base = OTHER; note = 2'-O-methyl modified nucleotide with phosphorothioate linkage
  misc_difference 33: note = 2'-fluoro modified nucleotide with phosphorothioate linkage may be attached to trivalent N-Acetylgalactosamine
taatttctctgtaggctccctacagagaaatta

SEQ ID NO: 975 - RNA, 33 nt, synthetic construct
  source 1..33: mol_type = other RNA
  misc_difference 1: note = 2'-O-methyl modified nucleotide with phosphorothioate linkage may be modified with 5'-Phosphate
  modified_base 2: mod_base = OTHER; note = 2'-fluoro modified nucleotide with phosphorothioate linkage
  modified_base 3: mod_base = OTHER; note = 2'-O-methyl modified nucleotide
  modified_base 4: mod_base = OTHER; note = 2'-fluoro modified nucleotide
  modified_base 5: mod_base = OTHER; note = 2'-O-methyl modified nucleotide
  modified_base 6: mod_base = OTHER; note = 2'-fluoro modified nucleotide
  modified_base 7: mod_base = OTHER; note = 2'-O-methyl modified nucleotide
  modified_base 8: mod_base = OTHER; note = 2'-fluoro modified nucleotide
  modified_base 9: mod_base = OTHER; note = 2'-O-methyl modified nucleotide
  modified_base 10: mod_base = OTHER; note = 2'-fluoro modified nucleotide
  modified_base 11: mod_base = OTHER; note = 2'-O-methyl modified nucleotide
  modified_base 12: mod_base = OTHER; note = 2'-fluoro modified nucleotide
  modified_base 13: mod_base = OTHER; note = 2'-O-methyl modified nucleotide
  modified_base 14: mod_base = OTHER; note = 2'-fluoro modified nucleotide with phosphorothioate linkage
  modified_base 15: mod_base = OTHER; note = 2'-O-methyl modified nucleotide with phosphorothioate linkage
  modified_base 16: mod_base = OTHER; note = 2'-fluoro modified nucleotide with phosphorothioate linkage
  modified_base 17: mod_base = OTHER; note = 2'-O-methyl modified nucleotide with phosphorothioate linkage
  modified_base 18: mod_base = OTHER; note = 2'-fluoro modified nucleotide with phosphorothioate linkage
  modified_base 19: mod_base = OTHER; note = 2'-O-methyl modified nucleotide with phosphorothioate linkage
  modified_base 20: mod_base = OTHER; note = 2'-O-methyl modified nucleotide
  modified_base 21: mod_base = OTHER; note = 2'-fluoro modified nucleotide
  modified_base 22: mod_base = OTHER; note = 2'-O-methyl modified nucleotide
  modified_base 23: mod_base = OTHER; note = 2'-fluoro modified nucleotide
  modified_base 24: mod_base = OTHER; note = 2'-O-methyl modified nucleotide
  modified_base 25: mod_base = OTHER; note = 2'-fluoro modified nucleotide
  modified_base 26: mod_base = OTHER; note = 2'-O-methyl modified nucleotide
  modified_base 27: mod_base = OTHER; note = 2'-fluoro modified nucleotide
  modified_base 28: mod_base = OTHER; note = 2'-O-methyl modified nucleotide
  modified_base 29: mod_base = OTHER; note = 2'-fluoro modified nucleotide
  modified_base 30: mod_base = OTHER; note = 2'-O-methyl modified nucleotide
  modified_base 31: mod_base = OTHER; note = 2'-fluoro modified nucleotide with phosphorothioate linkage
  modified_base 32: mod_base = OTHER; note = 2'-O-methyl modified nucleotide with phosphorothioate linkage
  misc_difference 33: note = 2'-fluoro modified nucleotide with phosphorothioate linkage may be attached to trivalent N-Acetylgalactosamine
ttttctctgtaggctccacgcctacagagaaaa

SEQ ID NO: 976 - RNA, 33 nt, synthetic construct
  source 1..33: mol_type = other RNA
  misc_difference 1: note = 2'-O-methyl modified nucleotide with phosphorothioate linkage may be modified with 5'-Phosphate
  modified_base 2: mod_base = OTHER; note = 2'-fluoro modified nucleotide with phosphorothioate linkage
  modified_base 3: mod_base = OTHER; note = 2'-O-methyl modified nucleotide
  modified_base 4: mod_base = OTHER; note = 2'-fluoro modified nucleotide
  modified_base 5: mod_base = OTHER; note = 2'-O-methyl modified nucleotide
  modified_base 6: mod_base = OTHER; note = 2'-fluoro modified nucleotide
  modified_base 7: mod_base = OTHER; note = 2'-O-methyl modified nucleotide
  modified_base 8: mod_base = OTHER; note = 2'-fluoro modified nucleotide
  modified_base 9: mod_base = OTHER; note = 2'-O-methyl modified nucleotide
  modified_base 10: mod_base = OTHER; note = 2'-fluoro modified nucleotide
  modified_base 11: mod_base = OTHER; note = 2'-O-methyl modified nucleotide
  modified_base 12: mod_base = OTHER; note = 2'-fluoro modified nucleotide
  modified_base 13: mod_base = OTHER; note = 2'-O-methyl modified nucleotide
  modified_base 14: mod_base = OTHER; note = 2'-fluoro modified nucleotide with phosphorothioate linkage
  modified_base 15: mod_base = OTHER; note = 2'-O-methyl modified nucleotide with phosphorothioate linkage
  modified_base 16: mod_base = OTHER; note = 2'-fluoro modified nucleotide with phosphorothioate linkage
  modified_base 17: mod_base = OTHER; note = 2'-O-methyl modified nucleotide with phosphorothioate linkage
  modified_base 18: mod_base = OTHER; note = 2'-fluoro modified nucleotide with phosphorothioate linkage
  modified_base 19: mod_base = OTHER; note = 2'-O-methyl modified nucleotide with phosphorothioate linkage
  modified_base 20: mod_base = OTHER; note = 2'-O-methyl modified nucleotide
  modified_base 21: mod_base = OTHER; note = 2'-fluoro modified nucleotide
  modified_base 22: mod_base = OTHER; note = 2'-O-methyl modified nucleotide
  modified_base 23: mod_base = OTHER; note = 2'-fluoro modified nucleotide
  modified_base 24: mod_base = OTHER; note = 2'-O-methyl modified nucleotide
  modified_base 25: mod_base = OTHER; note = 2'-fluoro modified nucleotide
  modified_base 26: mod_base = OTHER; note = 2'-O-methyl modified nucleotide
  modified_base 27: mod_base = OTHER; note = 2'-fluoro modified nucleotide
  modified_base 28: mod_base = OTHER; note = 2'-O-methyl modified nucleotide
  modified_base 29: mod_base = OTHER; note = 2'-fluoro modified nucleotide
  modified_base 30: mod_base = OTHER; note = 2'-O-methyl modified nucleotide
  modified_base 31: mod_base = OTHER; note = 2'-fluoro modified nucleotide with phosphorothioate linkage
  modified_base 32: mod_base = OTHER; note = 2'-O-methyl modified nucleotide with phosphorothioate linkage
  misc_difference 33: note = 2'-fluoro modified nucleotide with phosphorothioate linkage may be attached to trivalent N-Acetylgalactosamine
tgggccagtgctccacccaggagcactggccca

SEQ ID NO: 977 - RNA, 33 nt, synthetic construct
  source 1..33: mol_type = other RNA
  misc_difference 1: note = 2'-O-methyl modified nucleotide with phosphorothioate linkage may be modified with 5'-Phosphate
  modified_base 2: mod_base = OTHER; note = 2'-fluoro modified nucleotide with phosphorothioate linkage
  modified_base 3: mod_base = OTHER; note = 2'-O-methyl modified nucleotide
  modified_base 4: mod_base = OTHER; note = 2'-fluoro modified nucleotide
  modified_base 5: mod_base = OTHER; note = 2'-O-methyl modified nucleotide
  modified_base 6: mod_base = OTHER; note = 2'-fluoro modified nucleotide
  modified_base 7: mod_base = OTHER; note = 2'-O-methyl modified nucleotide
  modified_base 8: mod_base = OTHER; note = 2'-fluoro modified nucleotide
  modified_base 9: mod_base = OTHER; note = 2'-O-methyl modified nucleotide
  modified_base 10: mod_base = OTHER; note = 2'-fluoro modified nucleotide
  modified_base 11: mod_base = OTHER; note = 2'-O-methyl modified nucleotide
  modified_base 12: mod_base = OTHER; note = 2'-fluoro modified nucleotide
  modified_base 13: mod_base = OTHER; note = 2'-O-methyl modified nucleotide
  modified_base 14: mod_base = OTHER; note = 2'-fluoro modified nucleotide with phosphorothioate linkage
  modified_base 15: mod_base = OTHER; note = 2'-O-methyl modified nucleotide with phosphorothioate linkage
  modified_base 16: mod_base = OTHER; note = 2'-fluoro modified nucleotide with phosphorothioate linkage
  modified_base 17: mod_base = OTHER; note = 2'-O-methyl modified nucleotide with phosphorothioate linkage
  modified_base 18: mod_base = OTHER; note = 2'-fluoro modified nucleotide with phosphorothioate linkage
  modified_base 19: mod_base = OTHER; note = 2'-O-methyl modified nucleotide with phosphorothioate linkage
  modified_base 20: mod_base = OTHER; note = 2'-O-methyl modified nucleotide
  modified_base 21: mod_base = OTHER; note = 2'-fluoro modified nucleotide
  modified_base 22: mod_base = OTHER; note = 2'-O-methyl modified nucleotide
  modified_base 23: mod_base = OTHER; note = 2'-fluoro modified nucleotide
  modified_base 24: mod_base = OTHER; note = 2'-O-methyl modified nucleotide
  modified_base 25: mod_base = OTHER; note = 2'-fluoro modified nucleotide
  modified_base 26: mod_base = OTHER; note = 2'-O-methyl modified nucleotide
  modified_base 27: mod_base = OTHER; note = 2'-fluoro modified nucleotide
  modified_base 28: mod_base = OTHER; note = 2'-O-methyl modified nucleotide
  modified_base 29: mod_base = OTHER; note = 2'-fluoro modified nucleotide
  modified_base 30: mod_base = OTHER; note = 2'-O-methyl modified nucleotide
  modified_base 31: mod_base = OTHER; note = 2'-fluoro modified nucleotide with phosphorothioate linkage
  modified_base 32: mod_base = OTHER; note = 2'-O-methyl modified nucleotide with phosphorothioate linkage
  misc_difference 33: note = 2'-fluoro modified nucleotide with phosphorothioate linkage may be attached to trivalent N-Acetylgalactosamine
tgacatagtggcatcctggatgccactatgtca

SEQ ID NO: 978 - RNA, 33 nt, synthetic construct; identical to SEQ ID NO: 528
  source 1..33: mol_type = other RNA
  misc_difference 1: note = 2'-O-methyl modified nucleotide with phosphorothioate linkage may be modified with 5'-Phosphate
  modified_base 2: mod_base = OTHER; note = 2'-fluoro modified nucleotide with phosphorothioate linkage
  modified_base 3: mod_base = OTHER; note = 2'-O-methyl modified nucleotide
  modified_base 4: mod_base = OTHER; note = 2'-fluoro modified nucleotide
  modified_base 5: mod_base = OTHER; note = 2'-O-methyl modified nucleotide
  modified_base 6: mod_base = OTHER; note = 2'-fluoro modified nucleotide
  modified_base 7: mod_base = OTHER; note = 2'-O-methyl modified nucleotide
  modified_base 8: mod_base = OTHER; note = 2'-fluoro modified nucleotide
  modified_base 9: mod_base = OTHER; note = 2'-O-methyl modified nucleotide
  modified_base 10: mod_base = OTHER; note = 2'-fluoro modified nucleotide
  modified_base 11: mod_base = OTHER; note = 2'-O-methyl modified nucleotide
  modified_base 12: mod_base = OTHER; note = 2'-fluoro modified nucleotide
  modified_base 13: mod_base = OTHER; note = 2'-O-methyl modified nucleotide
  modified_base 14: mod_base = OTHER; note = 2'-fluoro modified nucleotide with phosphorothioate linkage
  modified_base 15: mod_base = OTHER; note = 2'-O-methyl modified nucleotide with phosphorothioate linkage
  modified_base 16: mod_base = OTHER; note = 2'-fluoro modified nucleotide with phosphorothioate linkage
  modified_base 17: mod_base = OTHER; note = 2'-O-methyl modified nucleotide with phosphorothioate linkage
  modified_base 18: mod_base = OTHER; note = 2'-fluoro modified nucleotide with phosphorothioate linkage
  modified_base 19: mod_base = OTHER; note = 2'-O-methyl modified nucleotide with phosphorothioate linkage
  modified_base 20: mod_base = OTHER; note = 2'-O-methyl modified nucleotide
  modified_base 21: mod_base = OTHER; note = 2'-fluoro modified nucleotide
  modified_base 22: mod_base = OTHER; note = 2'-O-methyl modified nucleotide
  modified_base 23: mod_base = OTHER; note = 2'-fluoro modified nucleotide
  modified_base 24: mod_base = OTHER; note = 2'-O-methyl modified nucleotide
  modified_base 25: mod_base = OTHER; note = 2'-fluoro modified nucleotide
  modified_base 26: mod_base = OTHER; note = 2'-O-methyl modified nucleotide
  modified_base 27: mod_base = OTHER; note = 2'-fluoro modified nucleotide
  modified_base 28: mod_base = OTHER; note = 2'-O-methyl modified nucleotide
  modified_base 29: mod_base = OTHER; note = 2'-fluoro modified nucleotide
  modified_base 30: mod_base = OTHER; note = 2'-O-methyl modified nucleotide
  modified_base 31: mod_base = OTHER; note = 2'-fluoro modified nucleotide with phosphorothioate linkage
  modified_base 32: mod_base = OTHER; note = 2'-O-methyl modified nucleotide with phosphorothioate linkage
  misc_difference 33: note = 2'-fluoro modified nucleotide with phosphorothioate linkage may be attached to trivalent N-Acetylgalactosamine

SEQ ID NO: 979 - RNA, 33 nt, synthetic construct
  source 1..33: mol_type = other RNA
  misc_difference 1: note = 2'-O-methyl modified nucleotide with phosphorothioate linkage may be modified with 5'-Phosphate
  modified_base 2: mod_base = OTHER; note = 2'-fluoro modified nucleotide with phosphorothioate linkage
  modified_base 3: mod_base = OTHER; note = 2'-O-methyl modified nucleotide
  modified_base 4: mod_base = OTHER; note = 2'-fluoro modified nucleotide
  modified_base 5: mod_base = OTHER; note = 2'-O-methyl modified nucleotide
  modified_base 6: mod_base = OTHER; note = 2'-fluoro modified nucleotide
  modified_base 7: mod_base = OTHER; note = 2'-O-methyl modified nucleotide
  modified_base 8: mod_base = OTHER; note = 2'-fluoro modified nucleotide
  modified_base 9: mod_base = OTHER; note = 2'-O-methyl modified nucleotide
  modified_base 10: mod_base = OTHER; note = 2'-fluoro modified nucleotide
  modified_base 11: mod_base = OTHER; note = 2'-O-methyl modified nucleotide
  modified_base 12: mod_base = OTHER; note = 2'-fluoro modified nucleotide
  modified_base 13: mod_base = OTHER; note = 2'-O-methyl modified nucleotide
  modified_base 14: mod_base = OTHER; note = 2'-fluoro modified nucleotide with phosphorothioate linkage
  modified_base 15: mod_base = OTHER; note = 2'-O-methyl modified nucleotide with phosphorothioate linkage
  modified_base 16: mod_base = OTHER; note = 2'-fluoro modified nucleotide with phosphorothioate linkage
  modified_base 17: mod_base = OTHER; note = 2'-O-methyl modified nucleotide with phosphorothioate linkage
  modified_base 18: mod_base = OTHER; note = 2'-fluoro modified nucleotide with phosphorothioate linkage
  modified_base 19: mod_base = OTHER; note = 2'-O-methyl modified nucleotide with phosphorothioate linkage
  modified_base 20: mod_base = OTHER; note = 2'-O-methyl modified nucleotide
  modified_base 21: mod_base = OTHER; note = 2'-fluoro modified nucleotide
  modified_base 22: mod_base = OTHER; note = 2'-O-methyl modified nucleotide
  modified_base 23: mod_base = OTHER; note = 2'-fluoro modified nucleotide
  modified_base 24: mod_base = OTHER; note = 2'-O-methyl modified nucleotide
  modified_base 25: mod_base = OTHER; note = 2'-fluoro modified nucleotide
  modified_base 26: mod_base = OTHER; note = 2'-O-methyl modified nucleotide
  modified_base 27: mod_base = OTHER; note = 2'-fluoro modified nucleotide
  modified_base 28: mod_base = OTHER; note = 2'-O-methyl modified nucleotide
  modified_base 29: mod_base = OTHER; note = 2'-fluoro modified nucleotide
  modified_base 30: mod_base = OTHER; note = 2'-O-methyl modified nucleotide
  modified_base 31: mod_base = OTHER; note = 2'-fluoro modified nucleotide with phosphorothioate linkage
  modified_base 32: mod_base = OTHER; note = 2'-O-methyl modified nucleotide with phosphorothioate linkage
  misc_difference 33: note = 2'-fluoro modified nucleotide with phosphorothioate linkage may be attached to trivalent N-Acetylgalactosamine
tttcattgagccaacgcacttggctcaatgaaa

SEQ ID NO: 980 - RNA, 33 nt, synthetic construct; identical to SEQ ID NO: 530
  source 1..33: mol_type = other RNA
  misc_difference 1: note = 2'-O-methyl modified nucleotide with phosphorothioate linkage may be modified with 5'-Phosphate
  modified_base 2: mod_base = OTHER; note = 2'-fluoro modified nucleotide with phosphorothioate linkage
  modified_base 3: mod_base = OTHER; note = 2'-O-methyl modified nucleotide
  modified_base 4: mod_base = OTHER; note = 2'-fluoro modified nucleotide
  modified_base 5: mod_base = OTHER; note = 2'-O-methyl modified nucleotide
  modified_base 6: mod_base = OTHER; note = 2'-fluoro modified nucleotide
  modified_base 7: mod_base = OTHER; note = 2'-O-methyl modified nucleotide
  modified_base 8: mod_base = OTHER; note = 2'-fluoro modified nucleotide
  modified_base 9: mod_base = OTHER; note = 2'-O-methyl modified nucleotide
  modified_base 10: mod_base = OTHER; note = 2'-fluoro modified nucleotide
  modified_base 11: mod_base = OTHER; note = 2'-O-methyl modified nucleotide
  modified_base 12: mod_base = OTHER; note = 2'-fluoro modified nucleotide
  modified_base 13: mod_base = OTHER; note = 2'-O-methyl modified nucleotide
  modified_base 14: mod_base = OTHER; note = 2'-fluoro modified nucleotide with phosphorothioate linkage
  modified_base 15: mod_base = OTHER; note = 2'-O-methyl modified nucleotide with phosphorothioate linkage
  modified_base 16: mod_base = OTHER; note = 2'-fluoro modified nucleotide with phosphorothioate linkage
  modified_base 17: mod_base = OTHER; note = 2'-O-methyl modified nucleotide with phosphorothioate linkage
  modified_base 18: mod_base = OTHER; note = 2'-fluoro modified nucleotide with phosphorothioate linkage
  modified_base 19: mod_base = OTHER; note = 2'-O-methyl modified nucleotide with phosphorothioate linkage
  modified_base 20: mod_base = OTHER; note = 2'-O-methyl modified nucleotide
  modified_base 21: mod_base = OTHER; note = 2'-fluoro modified nucleotide
  modified_base 22: mod_base = OTHER; note = 2'-O-methyl modified nucleotide
  modified_base 23: mod_base = OTHER; note = 2'-fluoro modified nucleotide
  modified_base 24: mod_base = OTHER; note = 2'-O-methyl modified nucleotide
  modified_base 25: mod_base = OTHER; note = 2'-fluoro modified nucleotide
  modified_base 26: mod_base = OTHER; note = 2'-O-methyl modified nucleotide
  modified_base 27: mod_base = OTHER; note = 2'-fluoro modified nucleotide
  modified_base 28: mod_base = OTHER; note = 2'-O-methyl modified nucleotide
  modified_base 29: mod_base = OTHER; note = 2'-fluoro modified nucleotide
  modified_base 30: mod_base = OTHER; note = 2'-O-methyl modified nucleotide
  modified_base 31: mod_base = OTHER; note = 2'-fluoro modified nucleotide with phosphorothioate linkage
  modified_base 32: mod_base = OTHER; note = 2'-O-methyl modified nucleotide with phosphorothioate linkage
  misc_difference 33: note = 2'-fluoro modified nucleotide with phosphorothioate linkage may be attached to trivalent N-Acetylgalactosamine

SEQ ID NO: 981 - RNA, 33 nt, synthetic construct
  source 1..33: mol_type = other RNA
  misc_difference 1: note = 2'-O-methyl modified nucleotide with phosphorothioate linkage may be modified with 5'-Phosphate
  modified_base 2: mod_base = OTHER; note = 2'-fluoro modified nucleotide with phosphorothioate linkage
  modified_base 3: mod_base = OTHER; note = 2'-O-methyl modified nucleotide
  modified_base 4: mod_base = OTHER; note = 2'-fluoro modified nucleotide
  modified_base 5: mod_base = OTHER; note = 2'-O-methyl modified nucleotide
  modified_base 6: mod_base = OTHER; note = 2'-fluoro modified nucleotide
  modified_base 7: mod_base = OTHER; note = 2'-O-methyl modified nucleotide
  modified_base 8: mod_base = OTHER; note = 2'-fluoro modified nucleotide
  modified_base 9: mod_base = OTHER; note = 2'-O-methyl modified nucleotide
  modified_base 10: mod_base = OTHER; note = 2'-fluoro modified nucleotide
  modified_base 11: mod_base = OTHER; note = 2'-O-methyl modified nucleotide
  modified_base 12: mod_base = OTHER; note = 2'-fluoro modified nucleotide
  modified_base 13: mod_base = OTHER; note = 2'-O-methyl modified nucleotide
  modified_base 14: mod_base = OTHER; note = 2'-fluoro modified nucleotide with phosphorothioate linkage
  modified_base 15: mod_base = OTHER; note = 2'-O-methyl modified nucleotide with phosphorothioate linkage
  modified_base 16: mod_base = OTHER; note = 2'-fluoro modified nucleotide with phosphorothioate linkage
  modified_base 17: mod_base = OTHER; note = 2'-O-methyl modified nucleotide with phosphorothioate linkage
  modified_base 18: mod_base = OTHER; note = 2'-fluoro modified nucleotide with phosphorothioate linkage
  modified_base 19: mod_base = OTHER; note = 2'-O-methyl modified nucleotide with phosphorothioate linkage
  modified_base 20: mod_base = OTHER; note = 2'-O-methyl modified nucleotide
  modified_base 21: mod_base = OTHER; note = 2'-fluoro modified nucleotide
  modified_base 22: mod_base = OTHER; note = 2'-O-methyl modified nucleotide
  modified_base 23: mod_base = OTHER; note = 2'-fluoro modified nucleotide
  modified_base 24: mod_base = OTHER; note = 2'-O-methyl modified nucleotide
  modified_base 25: mod_base = OTHER; note = 2'-fluoro modified nucleotide
  modified_base 26: mod_base = OTHER; note = 2'-O-methyl modified nucleotide
  modified_base 27: mod_base = OTHER; note = 2'-fluoro modified nucleotide
  modified_base 28: mod_base = OTHER; note = 2'-O-methyl modified nucleotide
  modified_base 29: mod_base = OTHER; note = 2'-fluoro modified nucleotide
  modified_base 30: mod_base = OTHER; note = 2'-O-methyl modified nucleotide
  modified_base 31: mod_base = OTHER; note = 2'-fluoro modified nucleotide with phosphorothioate linkage
  modified_base 32: mod_base = OTHER; note = 2'-O-methyl modified nucleotide with phosphorothioate linkage
  misc_difference 33: note = 2'-fluoro modified nucleotide with phosphorothioate linkage may be attached to trivalent N-Acetylgalactosamine
tgcaattctcctcagcacatgaggagaattgca

SEQ ID NO: 982 - RNA, 33 nt, synthetic construct
  source 1..33: mol_type = other RNA
  misc_difference 1: note = 2'-O-methyl modified nucleotide with phosphorothioate linkage may be modified with 5'-Phosphate
  modified_base 2: mod_base = OTHER; note = 2'-fluoro modified nucleotide with phosphorothioate linkage
  modified_base 3: mod_base = OTHER; note = 2'-O-methyl modified nucleotide
  modified_base 4: mod_base = OTHER; note = 2'-fluoro modified nucleotide
  modified_base 5: mod_base = OTHER; note = 2'-O-methyl modified nucleotide
  modified_base 6: mod_base = OTHER; note = 2'-fluoro modified nucleotide
  modified_base 7: mod_base = OTHER; note = 2'-O-methyl modified nucleotide
  modified_base 8: mod_base = OTHER; note = 2'-fluoro modified nucleotide
  modified_base 9: mod_base = OTHER; note = 2'-O-methyl modified nucleotide
  modified_base 10: mod_base = OTHER; note = 2'-fluoro modified nucleotide
  modified_base 11: mod_base = OTHER; note = 2'-O-methyl modified nucleotide
  modified_base 12: mod_base = OTHER; note = 2'-fluoro modified nucleotide
  modified_base 13: mod_base = OTHER; note = 2'-O-methyl modified nucleotide
  modified_base 14: mod_base = OTHER; note = 2'-fluoro modified nucleotide with phosphorothioate linkage
  modified_base 15: mod_base = OTHER; note = 2'-O-methyl modified nucleotide with phosphorothioate linkage
  modified_base 16: mod_base = OTHER; note = 2'-fluoro modified nucleotide with phosphorothioate linkage
  modified_base 17: mod_base = OTHER; note = 2'-O-methyl modified nucleotide with phosphorothioate linkage
  modified_base 18: mod_base = OTHER; note = 2'-fluoro modified nucleotide with phosphorothioate linkage
  modified_base 19: mod_base = OTHER; note = 2'-O-methyl modified nucleotide with phosphorothioate linkage
  modified_base 20: mod_base = OTHER; note = 2'-O-methyl modified nucleotide
  modified_base 21: mod_base = OTHER; note = 2'-fluoro modified nucleotide
  modified_base 22: mod_base = OTHER; note = 2'-O-methyl modified nucleotide
  modified_base 23: mod_base = OTHER; note = 2'-fluoro modified nucleotide
  modified_base 24: mod_base = OTHER; note = 2'-O-methyl modified nucleotide
  modified_base 25: mod_base = OTHER; note = 2'-fluoro modified nucleotide
  modified_base 26: mod_base = OTHER; note = 2'-O-methyl modified nucleotide
  modified_base 27: mod_base = OTHER; note = 2'-fluoro modified nucleotide
  modified_base 28: mod_base = OTHER; note = 2'-O-methyl modified nucleotide
  modified_base 29: mod_base = OTHER; note = 2'-fluoro modified nucleotide
  modified_base 30: mod_base = OTHER; note = 2'-O-methyl modified nucleotide
  modified_base 31: mod_base = OTHER; note = 2'-fluoro modified nucleotide with phosphorothioate linkage
  modified_base 32: mod_base = OTHER; note = 2'-O-methyl modified nucleotide with phosphorothioate linkage
  misc_difference 33: note = 2'-fluoro modified nucleotide with phosphorothioate linkage may be attached to trivalent N-Acetylgalactosamine
ttaggctcggatcttccacagatccgagcctaa

SEQ ID NO: 983 - RNA, 33 nt, synthetic construct
  source 1..33: mol_type = other RNA
  misc_difference 1: note = 2'-O-methyl modified nucleotide with phosphorothioate linkage may be modified with 5'-Phosphate
  modified_base 2: mod_base = OTHER; note = 2'-fluoro modified nucleotide with phosphorothioate linkage
  modified_base 3: mod_base = OTHER; note = 2'-O-methyl modified nucleotide
  modified_base 4: mod_base = OTHER; note = 2'-fluoro modified nucleotide
  modified_base 5: mod_base = OTHER; note = 2'-O-methyl modified nucleotide
  modified_base 6: mod_base = OTHER; note = 2'-fluoro modified nucleotide
  modified_base 7: mod_base = OTHER; note = 2'-O-methyl modified nucleotide
  modified_base 8: mod_base = OTHER; note = 2'-fluoro modified nucleotide
  modified_base 9: mod_base = OTHER; note = 2'-O-methyl modified nucleotide
  modified_base 10: mod_base = OTHER; note = 2'-fluoro modified nucleotide
  modified_base 11: mod_base = OTHER; note = 2'-O-methyl modified nucleotide
  modified_base 12: mod_base = OTHER; note = 2'-fluoro modified nucleotide
  modified_base 13: mod_base = OTHER; note = 2'-O-methyl modified nucleotide
  modified_base 14: mod_base = OTHER; note = 2'-fluoro modified nucleotide with phosphorothioate linkage
  modified_base 15: mod_base = OTHER; note = 2'-O-methyl modified nucleotide with phosphorothioate linkage
  modified_base 16: mod_base = OTHER; note = 2'-fluoro modified nucleotide with phosphorothioate linkage
  modified_base 17: mod_base = OTHER; note = 2'-O-methyl modified nucleotide with phosphorothioate linkage
  modified_base 18: mod_base = OTHER; note = 2'-fluoro modified nucleotide with phosphorothioate linkage
  modified_base 19: mod_base = OTHER; note = 2'-O-methyl modified nucleotide with phosphorothioate linkage
  modified_base 20: mod_base = OTHER; note = 2'-O-methyl modified nucleotide
  modified_base 21: mod_base = OTHER; note = 2'-fluoro modified nucleotide
  modified_base 22: mod_base = OTHER; note = 2'-O-methyl modified nucleotide
  modified_base 23: mod_base = OTHER; note = 2'-fluoro modified nucleotide
  modified_base 24: mod_base = OTHER; note = 2'-O-methyl modified nucleotide
  modified_base 25: mod_base = OTHER; note = 2'-fluoro modified nucleotide
  modified_base 26: mod_base = OTHER; note = 2'-O-methyl modified nucleotide
  modified_base 27: mod_base = OTHER; note = 2'-fluoro modified nucleotide
  modified_base 28: mod_base = OTHER; note = 2'-O-methyl modified nucleotide
  modified_base 29: mod_base = OTHER; note = 2'-fluoro modified nucleotide
  modified_base 30: mod_base = OTHER; note = 2'-O-methyl modified nucleotide
  modified_base 31: mod_base = OTHER; note = 2'-fluoro modified nucleotide with phosphorothioate linkage
  modified_base 32: mod_base = OTHER; note = 2'-O-methyl modified nucleotide with phosphorothioate linkage
  misc_difference 33: note = 2'-fluoro modified nucleotide with phosphorothioate linkage may be attached to trivalent N-Acetylgalactosamine
tgccatgatgtactcgtcaagtacatcatggca

SEQ ID NO: 984 - RNA, 33 nt, synthetic construct
  source 1..33: mol_type = other RNA
  misc_difference 1: note = 2'-O-methyl modified nucleotide with phosphorothioate linkage may be modified with 5'-Phosphate
  modified_base 2: mod_base = OTHER; note = 2'-fluoro modified nucleotide with phosphorothioate linkage
  modified_base 3: mod_base = OTHER; note = 2'-O-methyl modified nucleotide
  modified_base 4: mod_base = OTHER; note = 2'-fluoro modified nucleotide
  modified_base 5: mod_base = OTHER; note = 2'-O-methyl modified nucleotide
  modified_base 6: mod_base = OTHER; note = 2'-fluoro modified nucleotide
  modified_base 7: mod_base = OTHER; note = 2'-O-methyl modified nucleotide
  modified_base 8: mod_base = OTHER; note = 2'-fluoro modified nucleotide
  modified_base 9: mod_base = OTHER; note = 2'-O-methyl modified nucleotide
  modified_base 10: mod_base = OTHER; note = 2'-fluoro modified nucleotide
  modified_base 11: mod_base = OTHER; note = 2'-O-methyl modified nucleotide
  modified_base 12: mod_base = OTHER; note = 2'-fluoro modified nucleotide
  modified_base 13: mod_base = OTHER; note = 2'-O-methyl modified nucleotide
  modified_base 14: mod_base = OTHER; note = 2'-fluoro modified nucleotide with phosphorothioate linkage
  modified_base 15: mod_base = OTHER; note = 2'-O-methyl modified nucleotide with phosphorothioate linkage
  modified_base 16: mod_base = OTHER; note = 2'-fluoro modified nucleotide with phosphorothioate linkage
  modified_base 17: mod_base = OTHER; note = 2'-O-methyl modified nucleotide with phosphorothioate linkage
  modified_base 18: mod_base = OTHER; note = 2'-fluoro modified nucleotide with phosphorothioate linkage
  modified_base 19: mod_base = OTHER; note = 2'-O-methyl modified nucleotide with phosphorothioate linkage
  modified_base 20: mod_base = OTHER; note = 2'-O-methyl modified nucleotide
  modified_base 21: mod_base = OTHER; note = 2'-fluoro modified nucleotide
  modified_base 22: mod_base = OTHER; note = 2'-O-methyl modified nucleotide
  modified_base 23: mod_base = OTHER; note = 2'-fluoro modified nucleotide
  modified_base 24: mod_base = OTHER; note = 2'-O-methyl modified nucleotide
  modified_base 25: mod_base = OTHER; note = 2'-fluoro modified nucleotide
  modified_base 26: mod_base = OTHER; note = 2'-O-methyl modified nucleotide
  modified_base 27: mod_base = OTHER; note = 2'-fluoro modified nucleotide
  modified_base 28: mod_base = OTHER; note = 2'-O-methyl modified nucleotide
  modified_base 29: mod_base = OTHER; note = 2'-fluoro modified nucleotide
  modified_base 30: mod_base = OTHER; note = 2'-O-methyl modified nucleotide
  modified_base 31: mod_base = OTHER; note = 2'-fluoro modified nucleotide with phosphorothioate linkage
  modified_base 32: mod_base = OTHER; note = 2'-O-methyl modified nucleotide with phosphorothioate linkage
  misc_difference 33: note = 2'-fluoro modified nucleotide with phosphorothioate linkage may be attached to trivalent N-Acetylgalactosamine
taaagtcattggacagctggtccaatgacttta

SEQ ID NO: 985 - RNA, 33 nt, synthetic construct; identical to SEQ ID NO: 535
  source 1..33: mol_type = other RNA
  misc_difference 1: note = 2'-O-methyl modified nucleotide with phosphorothioate linkage may be modified with 5'-Phosphate
  modified_base 2: mod_base = OTHER; note = 2'-fluoro modified nucleotide with phosphorothioate linkage
  modified_base 3: mod_base = OTHER; note = 2'-O-methyl modified nucleotide
  modified_base 4: mod_base = OTHER; note = 2'-fluoro modified nucleotide
  modified_base 5: mod_base = OTHER; note = 2'-O-methyl modified nucleotide
  modified_base 6: mod_base = OTHER; note = 2'-fluoro modified nucleotide
  modified_base 7: mod_base = OTHER; note = 2'-O-methyl modified nucleotide
  modified_base 8: mod_base = OTHER; note = 2'-fluoro modified nucleotide
  modified_base 9: mod_base = OTHER; note = 2'-O-methyl modified nucleotide
  modified_base 10: mod_base = OTHER; note = 2'-fluoro modified nucleotide
  modified_base 11: mod_base = OTHER; note = 2'-O-methyl modified nucleotide
  modified_base 12: mod_base = OTHER; note = 2'-fluoro modified nucleotide
  modified_base 13: mod_base = OTHER; note = 2'-O-methyl modified nucleotide
  modified_base 14: mod_base = OTHER; note = 2'-fluoro modified nucleotide with phosphorothioate linkage
  modified_base 15: mod_base = OTHER; note = 2'-O-methyl modified nucleotide with phosphorothioate linkage
  modified_base 16: mod_base = OTHER; note = 2'-fluoro modified nucleotide with phosphorothioate linkage
  modified_base 17: mod_base = OTHER; note = 2'-O-methyl modified nucleotide with phosphorothioate linkage
  modified_base 18: mod_base = OTHER; note = 2'-fluoro modified nucleotide with phosphorothioate linkage
  modified_base 19: mod_base = OTHER; note = 2'-O-methyl modified nucleotide with phosphorothioate linkage
  modified_base 20: mod_base = OTHER; note = 2'-O-methyl modified nucleotide
  modified_base 21: mod_base = OTHER; note = 2'-fluoro modified nucleotide
  modified_base 22: mod_base = OTHER; note = 2'-O-methyl modified nucleotide
  modified_base 23: mod_base = OTHER; note = 2'-fluoro modified nucleotide
  modified_base 24: mod_base = OTHER; note = 2'-O-methyl modified nucleotide
  modified_base 25: mod_base = OTHER; note = 2'-fluoro modified nucleotide
  modified_base 26: mod_base = OTHER; note = 2'-O-methyl modified nucleotide
  modified_base 27: mod_base = OTHER; note = 2'-fluoro modified nucleotide
  modified_base 28: mod_base = OTHER; note = 2'-O-methyl modified nucleotide
  modified_base 29: mod_base = OTHER; note = 2'-fluoro modified nucleotide
  modified_base 30: mod_base = OTHER; note = 2'-O-methyl modified nucleotide
  modified_base 31: mod_base = OTHER; note = 2'-fluoro modified nucleotide with phosphorothioate linkage
  modified_base 32: mod_base = OTHER; note = 2'-O-methyl modified nucleotide with phosphorothioate linkage
  misc_difference 33: note = 2'-fluoro modified nucleotide with phosphorothioate linkage may be attached to trivalent N-Acetylgalactosamine

SEQ ID NO: 986 - RNA, 33 nt, synthetic construct; identical to SEQ ID NO: 536
  source 1..33: mol_type = other RNA
  misc_difference 1: note = 2'-O-methyl modified nucleotide with phosphorothioate linkage may be modified with 5'-Phosphate
  modified_base 2: mod_base = OTHER; note = 2'-fluoro modified nucleotide with phosphorothioate linkage
  modified_base 3: mod_base = OTHER; note = 2'-O-methyl modified nucleotide
  modified_base 4: mod_base = OTHER; note = 2'-fluoro modified nucleotide
  modified_base 5: mod_base = OTHER; note = 2'-O-methyl modified nucleotide
  modified_base 6: mod_base = OTHER; note = 2'-fluoro modified nucleotide
  modified_base 7: mod_base = OTHER; note = 2'-O-methyl modified nucleotide
  modified_base 8: mod_base = OTHER; note = 2'-fluoro modified nucleotide
  modified_base 9: mod_base = OTHER; note = 2'-O-methyl modified nucleotide
  modified_base 10: mod_base = OTHER; note = 2'-fluoro modified nucleotide
  modified_base 11: mod_base = OTHER; note = 2'-O-methyl modified nucleotide
  modified_base 12: mod_base = OTHER; note = 2'-fluoro modified nucleotide
  modified_base 13: mod_base = OTHER; note = 2'-O-methyl modified nucleotide
  modified_base 14: mod_base = OTHER; note = 2'-fluoro modified nucleotide with phosphorothioate linkage
  modified_base 15: mod_base = OTHER; note = 2'-O-methyl modified nucleotide with phosphorothioate linkage
  modified_base 16: mod_base = OTHER; note = 2'-fluoro modified nucleotide with phosphorothioate linkage
  modified_base 17: mod_base = OTHER; note = 2'-O-methyl modified nucleotide with phosphorothioate linkage
  modified_base 18: mod_base = OTHER; note = 2'-fluoro modified nucleotide with phosphorothioate linkage
  modified_base 19: mod_base = OTHER; note = 2'-O-methyl modified nucleotide with phosphorothioate linkage
  modified_base 20: mod_base = OTHER; note = 2'-O-methyl modified nucleotide
  modified_base 21: mod_base = OTHER; note = 2'-fluoro modified nucleotide
  modified_base 22: mod_base = OTHER; note = 2'-O-methyl modified nucleotide
  modified_base 23: mod_base = OTHER; note = 2'-fluoro modified nucleotide
  modified_base 24: mod_base = OTHER; note = 2'-O-methyl modified nucleotide
  modified_base 25: mod_base = OTHER; note = 2'-fluoro modified nucleotide
  modified_base 26: mod_base = OTHER; note = 2'-O-methyl modified nucleotide
  modified_base 27: mod_base = OTHER; note = 2'-fluoro modified nucleotide
  modified_base 28: mod_base = OTHER; note = 2'-O-methyl modified nucleotide
  modified_base 29: mod_base = OTHER; note = 2'-fluoro modified nucleotide
  modified_base 30: mod_base = OTHER; note = 2'-O-methyl modified nucleotide
  modified_base 31: mod_base = OTHER; note = 2'-fluoro modified nucleotide with phosphorothioate linkage
  modified_base 32: mod_base = OTHER; note = 2'-O-methyl modified nucleotide with phosphorothioate linkage
  misc_difference 33: note = 2'-fluoro modified nucleotide with phosphorothioate linkage may be attached to trivalent N-Acetylgalactosamine

SEQ ID NO: 987 - RNA, 33 nt, synthetic construct
  source 1..33: mol_type = other RNA
  misc_difference 1: note = 2'-O-methyl modified nucleotide with phosphorothioate linkage may be modified with 5'-Phosphate
  modified_base 2: mod_base = OTHER; note = 2'-fluoro modified nucleotide with phosphorothioate linkage
  modified_base 3: mod_base = OTHER; note = 2'-O-methyl modified nucleotide
  modified_base 4: mod_base = OTHER; note = 2'-fluoro modified nucleotide
  modified_base 5: mod_base = OTHER; note = 2'-O-methyl modified nucleotide
  modified_base 6: mod_base = OTHER; note = 2'-fluoro modified nucleotide
  modified_base 7: mod_base = OTHER; note = 2'-O-methyl modified nucleotide
  modified_base 8: mod_base = OTHER; note = 2'-fluoro modified nucleotide
  modified_base 9: mod_base = OTHER; note = 2'-O-methyl modified nucleotide
  modified_base 10: mod_base = OTHER; note = 2'-fluoro modified nucleotide
  modified_base 11: mod_base = OTHER; note = 2'-O-methyl modified nucleotide
  modified_base 12: mod_base = OTHER; note = 2'-fluoro modified nucleotide
  modified_base 13: mod_base = OTHER; note = 2'-O-methyl modified nucleotide
  modified_base 14: mod_base = OTHER; note = 2'-fluoro modified nucleotide with phosphorothioate linkage
  modified_base 15: mod_base = OTHER; note = 2'-O-methyl modified nucleotide with phosphorothioate linkage
  modified_base 16: mod_base = OTHER; note = 2'-fluoro modified nucleotide with phosphorothioate linkage
  modified_base 17: mod_base = OTHER; note = 2'-O-methyl modified nucleotide with phosphorothioate linkage
  modified_base 18: mod_base = OTHER; note = 2'-fluoro modified nucleotide with phosphorothioate linkage
  modified_base 19: mod_base = OTHER; note = 2'-O-methyl modified nucleotide with phosphorothioate linkage
  modified_base 20: mod_base = OTHER; note = 2'-O-methyl modified nucleotide
  modified_base 21: mod_base = OTHER; note = 2'-fluoro modified nucleotide
  modified_base 22: mod_base = OTHER; note = 2'-O-methyl modified nucleotide
  modified_base 23: mod_base = OTHER; note = 2'-fluoro modified nucleotide
  modified_base 24: mod_base = OTHER; note = 2'-O-methyl modified nucleotide
  modified_base 25: mod_base = OTHER; note = 2'-fluoro modified nucleotide
  modified_base 26: mod_base = OTHER; note = 2'-O-methyl modified nucleotide
  modified_base 27: mod_base = OTHER; note = 2'-fluoro modified nucleotide
  modified_base 28: mod_base = OTHER; note = 2'-O-methyl modified nucleotide
  modified_base 29: mod_base = OTHER; note = 2'-fluoro modified nucleotide
  modified_base 30: mod_base = OTHER; note = 2'-O-methyl modified nucleotide
  modified_base 31: mod_base = OTHER; note = 2'-fluoro modified nucleotide with phosphorothioate linkage
  modified_base 32: mod_base = OTHER; note = 2'-O-methyl modified nucleotide with phosphorothioate linkage
  misc_difference 33: note = 2'-fluoro modified nucleotide with phosphorothioate linkage may be attached to trivalent N-Acetylgalactosamine
tgtgatggagtctttcaaaaagactccatcaca

SEQ ID NO: 988 - RNA, 33 nt, synthetic construct
  source 1..33: mol_type = other RNA
  misc_difference 1: note = 2'-O-methyl modified nucleotide with phosphorothioate linkage may be modified with 5'-Phosphate
  modified_base 2: mod_base = OTHER; note = 2'-fluoro modified nucleotide with phosphorothioate linkage
  modified_base 3: mod_base = OTHER; note = 2'-O-methyl modified nucleotide
  modified_base 4: mod_base = OTHER; note = 2'-fluoro modified nucleotide
  modified_base 5: mod_base = OTHER; note = 2'-O-methyl modified nucleotide
  modified_base 6: mod_base = OTHER; note = 2'-fluoro modified nucleotide
  modified_base 7: mod_base = OTHER; note = 2'-O-methyl modified nucleotide
  modified_base 8: mod_base = OTHER; note = 2'-fluoro modified nucleotide
  modified_base 9: mod_base = OTHER; note = 2'-O-methyl modified nucleotide
  modified_base 10: mod_base = OTHER; note = 2'-fluoro modified nucleotide
  modified_base 11: mod_base = OTHER; note = 2'-O-methyl modified nucleotide
  modified_base 12: mod_base = OTHER; note = 2'-fluoro modified nucleotide
  modified_base 13: mod_base = OTHER; note = 2'-O-methyl modified nucleotide
  modified_base 14: mod_base = OTHER; note = 2'-fluoro modified nucleotide with phosphorothioate linkage
  modified_base 15: mod_base = OTHER; note = 2'-O-methyl modified nucleotide with phosphorothioate linkage
  modified_base 16: mod_base = OTHER; note = 2'-fluoro modified nucleotide with phosphorothioate linkage
  modified_base 17: mod_base = OTHER; note = 2'-O-methyl modified nucleotide with phosphorothioate linkage
  modified_base 18: mod_base = OTHER; note = 2'-fluoro modified nucleotide with phosphorothioate linkage
  modified_base 19: mod_base = OTHER; note = 2'-O-methyl modified nucleotide with phosphorothioate linkage
  modified_base 20: mod_base = OTHER; note = 2'-O-methyl modified nucleotide
  modified_base 21: mod_base = OTHER; note = 2'-fluoro modified nucleotide
  modified_base 22: mod_base = OTHER; note = 2'-O-methyl modified nucleotide
  modified_base 23: mod_base = OTHER; note = 2'-fluoro modified nucleotide
  modified_base 24: mod_base = OTHER; note = 2'-O-methyl modified nucleotide
  modified_base 25: mod_base = OTHER; note = 2'-fluoro modified nucleotide
  modified_base 26: mod_base = OTHER; note = 2'-O-methyl modified nucleotide
  modified_base 27: mod_base = OTHER; note = 2'-fluoro modified nucleotide
  modified_base 28: mod_base = OTHER; note = 2'-O-methyl modified nucleotide
  modified_base 29: mod_base = OTHER; note = 2'-fluoro modified nucleotide
  modified_base 30: mod_base = OTHER; note = 2'-O-methyl modified nucleotide
  modified_base 31: mod_base = OTHER; note = 2'-fluoro modified nucleotide with phosphorothioate linkage
  modified_base 32: mod_base = OTHER; note = 2'-O-methyl modified nucleotide with phosphorothioate linkage
  misc_difference 33: note = 2'-fluoro modified nucleotide with phosphorothioate linkage may be attached to trivalent N-Acetylgalactosamine
tcacagtgtaggatctctgatcctacactgtga

SEQ ID NO: 989 - RNA, 33 nt, synthetic construct
  source 1..33: mol_type = other RNA
  misc_difference 1: note = 2'-O-methyl modified nucleotide with phosphorothioate linkage may be modified with 5'-Phosphate
  modified_base 2: mod_base = OTHER; note = 2'-fluoro modified nucleotide with phosphorothioate linkage
  modified_base 3: mod_base = OTHER; note = 2'-O-methyl modified nucleotide
  modified_base 4: mod_base = OTHER; note = 2'-fluoro modified nucleotide
  modified_base 5: mod_base = OTHER; note = 2'-O-methyl modified nucleotide
  modified_base 6: mod_base = OTHER; note = 2'-fluoro modified nucleotide
  modified_base 7: mod_base = OTHER; note = 2'-O-methyl modified nucleotide
  modified_base 8: mod_base = OTHER; note = 2'-fluoro modified nucleotide
  modified_base 9: mod_base = OTHER; note = 2'-O-methyl modified nucleotide
  modified_base 10: mod_base = OTHER; note = 2'-fluoro modified nucleotide
  modified_base 11: mod_base = OTHER; note = 2'-O-methyl modified nucleotide
  modified_base 12: mod_base = OTHER; note = 2'-fluoro modified nucleotide
  modified_base 13: mod_base = OTHER; note = 2'-O-methyl modified nucleotide
  modified_base 14: mod_base = OTHER; note = 2'-fluoro modified nucleotide with phosphorothioate linkage
  modified_base 15: mod_base = OTHER; note = 2'-O-methyl modified nucleotide with phosphorothioate linkage
  modified_base 16: mod_base = OTHER; note = 2'-fluoro modified nucleotide with phosphorothioate linkage
  modified_base 17: mod_base = OTHER; note = 2'-O-methyl modified nucleotide with phosphorothioate linkage
  modified_base 18: mod_base = OTHER; note = 2'-fluoro modified nucleotide with phosphorothioate linkage
  modified_base 19: mod_base = OTHER; note = 2'-O-methyl modified nucleotide with phosphorothioate linkage
  modified_base 20: mod_base = OTHER; note = 2'-O-methyl modified nucleotide
  modified_base 21: mod_base = OTHER; note = 2'-fluoro modified nucleotide
  modified_base 22: mod_base = OTHER; note = 2'-O-methyl modified nucleotide
  modified_base 23: mod_base = OTHER; note = 2'-fluoro modified nucleotide
  modified_base 24: mod_base = OTHER; note = 2'-O-methyl modified nucleotide
  modified_base 25: mod_base = OTHER; note = 2'-fluoro modified nucleotide
  modified_base 26: mod_base = OTHER; note = 2'-O-methyl modified nucleotide
  modified_base 27: mod_base = OTHER; note = 2'-fluoro modified nucleotide
  modified_base 28: mod_base = OTHER; note = 2'-O-methyl modified nucleotide
  modified_base 29: mod_base = OTHER; note = 2'-fluoro modified nucleotide
  modified_base 30: mod_base = OTHER; note = 2'-O-methyl modified nucleotide
  modified_base 31: mod_base = OTHER; note = 2'-fluoro modified nucleotide with phosphorothioate linkage
  modified_base 32: mod_base = OTHER; note = 2'-O-methyl modified nucleotide with phosphorothioate linkage
  misc_difference 33: note = 2'-fluoro modified nucleotide with phosphorothioate linkage may be attached to trivalent N-Acetylgalactosamine
tctgtgactgtgaaaccctttcacagtcacaga

SEQ ID NO: 990 - RNA, 33 nt, synthetic construct
  source 1..33: mol_type = other RNA
  misc_difference 1: note = 2'-O-methyl modified nucleotide with phosphorothioate linkage may be modified with 5'-Phosphate
  modified_base 2: mod_base = OTHER; note = 2'-fluoro modified nucleotide with phosphorothioate linkage
  modified_base 3: mod_base = OTHER; note = 2'-O-methyl modified nucleotide
  modified_base 4: mod_base = OTHER; note = 2'-fluoro modified nucleotide
  modified_base 5: mod_base = OTHER; note = 2'-O-methyl modified nucleotide
  modified_base 6: mod_base = OTHER; note = 2'-fluoro modified nucleotide
  modified_base 7: mod_base = OTHER; note = 2'-O-methyl modified nucleotide
  modified_base 8: mod_base = OTHER; note = 2'-fluoro modified nucleotide
  modified_base 9: mod_base = OTHER; note = 2'-O-methyl modified nucleotide
  modified_base 10: mod_base = OTHER; note = 2'-fluoro modified nucleotide
  modified_base 11: mod_base = OTHER; note = 2'-O-methyl modified nucleotide
  modified_base 12: mod_base = OTHER; note = 2'-fluoro modified nucleotide
  modified_base 13: mod_base = OTHER; note = 2'-O-methyl modified nucleotide
  modified_base 14: mod_base = OTHER; note = 2'-fluoro modified nucleotide with phosphorothioate linkage
  modified_base 15: mod_base = OTHER; note = 2'-O-methyl modified nucleotide with phosphorothioate linkage
  modified_base 16: mod_base = OTHER; note = 2'-fluoro modified nucleotide with phosphorothioate linkage
  modified_base 17: mod_base = OTHER; note = 2'-O-methyl modified nucleotide with phosphorothioate linkage
  modified_base 18: mod_base = OTHER; note = 2'-fluoro modified nucleotide with phosphorothioate linkage
  modified_base 19: mod_base = OTHER; note = 2'-O-methyl modified nucleotide with phosphorothioate linkage
  modified_base 20: mod_base = OTHER; note = 2'-O-methyl modified nucleotide
  modified_base 21: mod_base = OTHER; note = 2'-fluoro modified nucleotide
  modified_base 22: mod_base = OTHER; note = 2'-O-methyl modified nucleotide
  modified_base 23: mod_base = OTHER; note = 2'-fluoro modified nucleotide
  modified_base 24: mod_base = OTHER; note = 2'-O-methyl modified nucleotide
  modified_base 25: mod_base = OTHER; note = 2'-fluoro modified nucleotide
  modified_base 26: mod_base = OTHER; note = 2'-O-methyl modified nucleotide
  modified_base 27: mod_base = OTHER; note = 2'-fluoro modified nucleotide
  modified_base 28: mod_base = OTHER; note = 2'-O-methyl modified nucleotide
  modified_base 29: mod_base = OTHER; note = 2'-fluoro modified nucleotide
  modified_base 30: mod_base = OTHER; note = 2'-O-methyl modified nucleotide
  modified_base 31: mod_base = OTHER; note = 2'-fluoro modified nucleotide with phosphorothioate linkage
  modified_base 32: mod_base = OTHER; note = 2'-O-methyl modified nucleotide with phosphorothioate linkage
  misc_difference 33: note = 2'-fluoro modified nucleotide with phosphorothioate linkage may be attached to trivalent N-Acetylgalactosamine
tcagaatctcccacgtggtgtgggagattctga

SEQ ID NO: 991 - RNA, 33 nt, synthetic construct
  source 1..33: mol_type = other RNA
  misc_difference 1: note = 2'-O-methyl modified nucleotide with phosphorothioate linkage may be modified with 5'-Phosphate
  modified_base 2: mod_base = OTHER; note = 2'-fluoro modified nucleotide with phosphorothioate linkage
  modified_base 3: mod_base = OTHER; note = 2'-O-methyl modified nucleotide
  modified_base 4: mod_base = OTHER; note = 2'-fluoro modified nucleotide
  modified_base 5: mod_base = OTHER; note = 2'-O-methyl modified nucleotide
  modified_base 6: mod_base = OTHER; note = 2'-fluoro modified nucleotide
  modified_base 7: mod_base = OTHER; note = 2'-O-methyl modified nucleotide
  modified_base 8: mod_base = OTHER; note = 2'-fluoro modified nucleotide
  modified_base 9: mod_base = OTHER; note = 2'-O-methyl modified nucleotide
  modified_base 10: mod_base = OTHER; note = 2'-fluoro modified nucleotide
  modified_base 11: mod_base = OTHER; note = 2'-O-methyl modified nucleotide
  modified_base 12: mod_base = OTHER; note = 2'-fluoro modified nucleotide
  modified_base 13: mod_base = OTHER; note = 2'-O-methyl modified nucleotide
  modified_base 14: mod_base = OTHER; note = 2'-fluoro modified nucleotide with phosphorothioate linkage
  modified_base 15: mod_base = OTHER; note = 2'-O-methyl modified nucleotide with phosphorothioate linkage
  modified_base 16: mod_base = OTHER; note = 2'-fluoro modified nucleotide with phosphorothioate linkage
  modified_base 17: mod_base = OTHER; note = 2'-O-methyl modified nucleotide with phosphorothioate linkage
  modified_base 18: mod_base = OTHER; note = 2'-fluoro modified nucleotide with phosphorothioate linkage
  modified_base 19: mod_base = OTHER; note = 2'-O-methyl modified nucleotide with phosphorothioate linkage
  modified_base 20: mod_base = OTHER; note = 2'-O-methyl modified nucleotide
  modified_base 21: mod_base = OTHER; note = 2'-fluoro modified nucleotide
  modified_base 22: mod_base = OTHER; note = 2'-O-methyl modified nucleotide
  modified_base 23: mod_base = OTHER; note = 2'-fluoro modified nucleotide
  modified_base 24: mod_base = OTHER; note = 2'-O-methyl modified nucleotide
  modified_base 25: mod_base = OTHER; note = 2'-fluoro modified nucleotide
  modified_base 26: mod_base = OTHER; note = 2'-O-methyl modified nucleotide
  modified_base 27: mod_base = OTHER; note = 2'-fluoro modified nucleotide
  modified_base 28: mod_base = OTHER; note = 2'-O-methyl modified nucleotide
  modified_base 29: mod_base = OTHER; note = 2'-fluoro modified nucleotide
  modified_base 30: mod_base = OTHER; note = 2'-O-methyl modified nucleotide
  modified_base 31: mod_base = OTHER; note = 2'-fluoro modified nucleotide with phosphorothioate linkage
  modified_base 32: mod_base = OTHER; note = 2'-O-methyl modified nucleotide with phosphorothioate linkage
  misc_difference 33: note = 2'-fluoro modified nucleotide with phosphorothioate linkage may be attached to trivalent N-Acetylgalactosamine
tctgctttagtgatgctgcatcactaaagcaga

SEQ ID NO: 992 - RNA, 33 nt, synthetic construct
  source 1..33: mol_type = other RNA
  misc_difference 1: note = 2'-O-methyl modified nucleotide with phosphorothioate linkage may be modified with 5'-Phosphate
  modified_base 2: mod_base = OTHER; note = 2'-fluoro modified nucleotide with phosphorothioate linkage
  modified_base 3: mod_base = OTHER; note = 2'-O-methyl modified nucleotide
  modified_base 4: mod_base = OTHER; note = 2'-fluoro modified nucleotide
  modified_base 5: mod_base = OTHER; note = 2'-O-methyl modified nucleotide
  modified_base 6: mod_base = OTHER; note = 2'-fluoro modified nucleotide
  modified_base 7: mod_base = OTHER; note = 2'-O-methyl modified nucleotide
  modified_base 8: mod_base = OTHER; note = 2'-fluoro modified nucleotide
  modified_base 9: mod_base = OTHER; note = 2'-O-methyl modified nucleotide
  modified_base 10: mod_base = OTHER; note = 2'-fluoro modified nucleotide
  modified_base 11: mod_base = OTHER; note = 2'-O-methyl modified nucleotide
  modified_base 12: mod_base = OTHER; note = 2'-fluoro modified nucleotide
  modified_base 13: mod_base = OTHER; note = 2'-O-methyl modified nucleotide
  modified_base 14: mod_base = OTHER; note = 2'-fluoro modified nucleotide with phosphorothioate linkage
  modified_base 15: mod_base = OTHER; note = 2'-O-methyl modified nucleotide with phosphorothioate linkage
  modified_base 16: mod_base = OTHER; note = 2'-fluoro modified nucleotide with phosphorothioate linkage
  modified_base 17: mod_base = OTHER; note = 2'-O-methyl modified nucleotide with phosphorothioate linkage
  modified_base 18: mod_base = OTHER; note = 2'-fluoro modified nucleotide with phosphorothioate linkage
  modified_base 19: mod_base = OTHER; note = 2'-O-methyl modified nucleotide with phosphorothioate linkage
  modified_base 20: mod_base = OTHER; note = 2'-O-methyl modified nucleotide
  modified_base 21: mod_base = OTHER; note = 2'-fluoro modified nucleotide
  modified_base 22: mod_base = OTHER; note = 2'-O-methyl modified nucleotide
  modified_base 23: mod_base = OTHER; note = 2'-fluoro modified nucleotide
  modified_base 24: mod_base = OTHER; note = 2'-O-methyl modified nucleotide
  modified_base 25: mod_base = OTHER; note = 2'-fluoro modified nucleotide
  modified_base 26: mod_base = OTHER; note = 2'-O-methyl modified nucleotide
  modified_base 27: mod_base = OTHER; note = 2'-fluoro modified nucleotide
  modified_base 28: mod_base = OTHER; note = 2'-O-methyl modified nucleotide
  modified_base 29: mod_base = OTHER; note = 2'-fluoro modified nucleotide
  modified_base 30: mod_base = OTHER; note = 2'-O-methyl modified nucleotide
  modified_base 31: mod_base = OTHER; note = 2'-fluoro modified nucleotide with phosphorothioate linkage
  modified_base 32: mod_base = OTHER; note = 2'-O-methyl modified nucleotide with phosphorothioate linkage
  misc_difference 33: note = 2'-fluoro modified nucleotide with phosphorothioate linkage may be attached to trivalent N-Acetylgalactosamine
ttgagggtgttcctatcggaggaacaccctcaa

SEQ ID NO: 993 - RNA, 33 nt, synthetic construct; identical to SEQ ID NO: 543
  source 1..33: mol_type = other RNA
  misc_difference 1: note = 2'-O-methyl modified nucleotide with phosphorothioate linkage may be modified with 5'-Phosphate
  modified_base 2: mod_base = OTHER; note = 2'-fluoro modified nucleotide with phosphorothioate linkage
  modified_base 3: mod_base = OTHER; note = 2'-O-methyl modified nucleotide
  modified_base 4: mod_base = OTHER; note = 2'-fluoro modified nucleotide
  modified_base 5: mod_base = OTHER; note = 2'-O-methyl modified nucleotide
  modified_base 6: mod_base = OTHER; note = 2'-fluoro modified nucleotide
  modified_base 7: mod_base = OTHER; note = 2'-O-methyl modified nucleotide
  modified_base 8: mod_base = OTHER; note = 2'-fluoro modified nucleotide
  modified_base 9: mod_base = OTHER; note = 2'-O-methyl modified nucleotide
  modified_base 10: mod_base = OTHER; note = 2'-fluoro modified nucleotide
  modified_base 11: mod_base = OTHER; note = 2'-O-methyl modified nucleotide
  modified_base 12: mod_base = OTHER; note = 2'-fluoro modified nucleotide
  modified_base 13: mod_base = OTHER; note = 2'-O-methyl modified nucleotide
  modified_base 14: mod_base = OTHER; note = 2'-fluoro modified nucleotide with phosphorothioate linkage
  modified_base 15: mod_base = OTHER; note = 2'-O-methyl modified nucleotide with phosphorothioate linkage
  modified_base 16: mod_base = OTHER; note = 2'-fluoro modified nucleotide with phosphorothioate linkage
  modified_base 17: mod_base = OTHER; note = 2'-O-methyl modified nucleotide with phosphorothioate linkage
  modified_base 18: mod_base = OTHER; note = 2'-fluoro modified nucleotide with phosphorothioate linkage
  modified_base 19: mod_base = OTHER; note = 2'-O-methyl modified nucleotide with phosphorothioate linkage
  modified_base 20: mod_base = OTHER; note = 2'-O-methyl modified nucleotide
  modified_base 21: mod_base = OTHER; note = 2'-fluoro modified nucleotide
  modified_base 22: mod_base = OTHER; note = 2'-O-methyl modified nucleotide
  modified_base 23: mod_base = OTHER; note = 2'-fluoro modified nucleotide
  modified_base 24: mod_base = OTHER; note = 2'-O-methyl modified nucleotide
  modified_base 25: mod_base = OTHER; note = 2'-fluoro modified nucleotide
  modified_base 26: mod_base = OTHER; note = 2'-O-methyl modified nucleotide
  modified_base 27: mod_base = OTHER; note = 2'-fluoro modified nucleotide
  modified_base 28: mod_base = OTHER; note = 2'-O-methyl modified nucleotide
  modified_base 29: mod_base = OTHER; note = 2'-fluoro modified nucleotide
  modified_base 30: mod_base = OTHER; note = 2'-O-methyl modified nucleotide
  modified_base 31: mod_base = OTHER; note = 2'-fluoro modified nucleotide with phosphorothioate linkage
  modified_base 32: mod_base = OTHER; note = 2'-O-methyl modified nucleotide with phosphorothioate linkage
  misc_difference 33: note = 2'-fluoro modified nucleotide with phosphorothioate linkage may be attached to trivalent N-Acetylgalactosamine

SEQ ID NO: 994 - RNA, 33 nt, synthetic construct; identical to SEQ ID NO: 544
  source 1..33: mol_type = other RNA
  misc_difference 1: note = 2'-O-methyl modified nucleotide with phosphorothioate linkage may be modified with 5'-Phosphate
  modified_base 2: mod_base = OTHER; note = 2'-fluoro modified nucleotide with phosphorothioate linkage
  modified_base 3: mod_base = OTHER; note = 2'-O-methyl modified nucleotide
  modified_base 4: mod_base = OTHER; note = 2'-fluoro modified nucleotide
  modified_base 5: mod_base = OTHER; note = 2'-O-methyl modified nucleotide
  modified_base 6: mod_base = OTHER; note = 2'-fluoro modified nucleotide
  modified_base 7: mod_base = OTHER; note = 2'-O-methyl modified nucleotide
  modified_base 8: mod_base = OTHER; note = 2'-fluoro modified nucleotide
  modified_base 9: mod_base = OTHER; note = 2'-O-methyl modified nucleotide
  modified_base 10: mod_base = OTHER; note = 2'-fluoro modified nucleotide
  modified_base 11: mod_base = OTHER; note = 2'-O-methyl modified nucleotide
  modified_base 12: mod_base = OTHER; note = 2'-fluoro modified nucleotide
  modified_base 13: mod_base = OTHER; note = 2'-O-methyl modified nucleotide
  modified_base 14: mod_base = OTHER; note = 2'-fluoro modified nucleotide with phosphorothioate linkage
  modified_base 15: mod_base = OTHER; note = 2'-O-methyl modified nucleotide with phosphorothioate linkage
  modified_base 16: mod_base = OTHER; note = 2'-fluoro modified nucleotide with phosphorothioate linkage
  modified_base 17: mod_base = OTHER; note = 2'-O-methyl modified nucleotide with phosphorothioate linkage
  modified_base 18: mod_base = OTHER; note = 2'-fluoro modified nucleotide with phosphorothioate linkage
  modified_base 19: mod_base = OTHER; note = 2'-O-methyl modified nucleotide with phosphorothioate linkage
  modified_base 20: mod_base = OTHER; note = 2'-O-methyl modified nucleotide
  modified_base 21: mod_base = OTHER; note = 2'-fluoro modified nucleotide
  modified_base 22: mod_base = OTHER; note = 2'-O-methyl modified nucleotide
  modified_base 23: mod_base = OTHER; note = 2'-fluoro modified nucleotide
  modified_base 24: mod_base = OTHER; note = 2'-O-methyl modified nucleotide
  modified_base 25: mod_base = OTHER; note = 2'-fluoro modified nucleotide
  modified_base 26: mod_base = OTHER; note = 2'-O-methyl modified nucleotide
  modified_base 27: mod_base = OTHER; note = 2'-fluoro modified nucleotide
  modified_base 28: mod_base = OTHER; note = 2'-O-methyl modified nucleotide
  modified_base 29: mod_base = OTHER; note = 2'-fluoro modified nucleotide
  modified_base 30: mod_base = OTHER; note = 2'-O-methyl modified nucleotide
  modified_base 31: mod_base = OTHER; note = 2'-fluoro modified nucleotide with phosphorothioate linkage
  modified_base 32: mod_base = OTHER; note = 2'-O-methyl modified nucleotide with phosphorothioate linkage
  misc_difference 33: note = 2'-fluoro modified nucleotide with phosphorothioate linkage may be attached to trivalent N-Acetylgalactosamine

SEQ ID NO: 995 - RNA, 33 nt, synthetic construct
  source 1..33: mol_type = other RNA
  misc_difference 1: note = 2'-O-methyl modified nucleotide with phosphorothioate linkage may be modified with 5'-Phosphate
  modified_base 2: mod_base = OTHER; note = 2'-fluoro modified nucleotide with phosphorothioate linkage
  modified_base 3: mod_base = OTHER; note = 2'-O-methyl modified nucleotide
  modified_base 4: mod_base = OTHER; note = 2'-fluoro modified nucleotide
  modified_base 5: mod_base = OTHER; note = 2'-O-methyl modified nucleotide
  modified_base 6: mod_base = OTHER; note = 2'-fluoro modified nucleotide
  modified_base 7: mod_base = OTHER; note = 2'-O-methyl modified nucleotide
  modified_base 8: mod_base = OTHER; note = 2'-fluoro modified nucleotide
  modified_base 9: mod_base = OTHER; note = 2'-O-methyl modified nucleotide
  modified_base 10: mod_base = OTHER; note = 2'-fluoro modified nucleotide
  modified_base 11: mod_base = OTHER; note = 2'-O-methyl modified nucleotide
  modified_base 12: mod_base = OTHER; note = 2'-fluoro modified nucleotide
  modified_base 13: mod_base = OTHER; note = 2'-O-methyl modified nucleotide
  modified_base 14: mod_base = OTHER; note = 2'-fluoro modified nucleotide with phosphorothioate linkage
  modified_base 15: mod_base = OTHER; note = 2'-O-methyl modified nucleotide with phosphorothioate linkage
  modified_base 16: mod_base = OTHER; note = 2'-fluoro modified nucleotide with phosphorothioate linkage
  modified_base 17: mod_base = OTHER; note = 2'-O-methyl modified nucleotide with phosphorothioate linkage
  modified_base 18: mod_base = OTHER; note = 2'-fluoro modified nucleotide with phosphorothioate linkage
  modified_base 19: mod_base = OTHER; note = 2'-O-methyl modified nucleotide with phosphorothioate linkage
  modified_base 20: mod_base = OTHER; note = 2'-O-methyl modified nucleotide
  modified_base 21: mod_base = OTHER; note = 2'-fluoro modified nucleotide
  modified_base 22: mod_base = OTHER; note = 2'-O-methyl modified nucleotide
  modified_base 23: mod_base = OTHER; note = 2'-fluoro modified nucleotide
  modified_base 24: mod_base = OTHER; note = 2'-O-methyl modified nucleotide
  modified_base 25: mod_base = OTHER; note = 2'-fluoro modified nucleotide
  modified_base 26: mod_base = OTHER; note = 2'-O-methyl modified nucleotide
  modified_base 27: mod_base = OTHER; note = 2'-fluoro modified nucleotide
  modified_base 28: mod_base = OTHER; note = 2'-O-methyl modified nucleotide
  modified_base 29: mod_base = OTHER; note = 2'-fluoro modified nucleotide
  modified_base 30: mod_base = OTHER; note = 2'-O-methyl modified nucleotide
  modified_base 31: mod_base = OTHER; note = 2'-fluoro modified nucleotide with phosphorothioate linkage
  modified_base 32: mod_base = OTHER; note = 2'-O-methyl modified nucleotide with phosphorothioate linkage
  misc_difference 33: note = 2'-fluoro modified nucleotide with phosphorothioate linkage may be attached to trivalent N-Acetylgalactosamine
tgtagaatttctctgtaggagagaaattctaca

SEQ ID NO: 996 - RNA, 33 nt, synthetic construct; identical to SEQ ID NO: 546
  source 1..33: mol_type = other RNA
  misc_difference 1: note = 2'-O-methyl modified nucleotide with phosphorothioate linkage may be modified with 5'-Phosphate
  modified_base 2: mod_base = OTHER; note = 2'-fluoro modified nucleotide with phosphorothioate linkage
  modified_base 3: mod_base = OTHER; note = 2'-O-methyl modified nucleotide
  modified_base 4: mod_base = OTHER; note = 2'-fluoro modified nucleotide
  modified_base 5: mod_base = OTHER; note = 2'-O-methyl modified nucleotide
  modified_base 6: mod_base = OTHER; note = 2'-fluoro modified nucleotide
  modified_base 7: mod_base = OTHER; note = 2'-O-methyl modified nucleotide
  modified_base 8: mod_base = OTHER; note = 2'-fluoro modified nucleotide
  modified_base 9: mod_base = OTHER; note = 2'-O-methyl modified nucleotide
  modified_base 10: mod_base = OTHER; note = 2'-fluoro modified nucleotide
  modified_base 11: mod_base = OTHER; note = 2'-O-methyl modified nucleotide
  modified_base 12: mod_base = OTHER; note = 2'-fluoro modified nucleotide
  modified_base 13: mod_base = OTHER; note = 2'-O-methyl modified nucleotide
  modified_base 14: mod_base = OTHER; note = 2'-fluoro modified nucleotide with phosphorothioate linkage
  modified_base 15: mod_base = OTHER; note = 2'-O-methyl modified nucleotide with phosphorothioate linkage
  modified_base 16: mod_base = OTHER; note = 2'-fluoro modified nucleotide with phosphorothioate linkage
  modified_base 17: mod_base = OTHER; note = 2'-O-methyl modified nucleotide with phosphorothioate linkage
  modified_base 18: mod_base = OTHER; note = 2'-fluoro modified nucleotide with phosphorothioate linkage
  modified_base 19: mod_base = OTHER; note = 2'-O-methyl modified nucleotide with phosphorothioate linkage
  modified_base 20: mod_base = OTHER; note = 2'-O-methyl modified nucleotide
  modified_base 21: mod_base = OTHER; note = 2'-fluoro modified nucleotide
  modified_base 22: mod_base = OTHER; note = 2'-O-methyl modified nucleotide
  modified_base 23: mod_base = OTHER; note = 2'-fluoro modified nucleotide
  modified_base 24: mod_base = OTHER; note = 2'-O-methyl modified nucleotide
  modified_base 25: mod_base = OTHER; note = 2'-fluoro modified nucleotide
  modified_base 26: mod_base = OTHER; note = 2'-O-methyl modified nucleotide
  modified_base 27: mod_base = OTHER; note = 2'-fluoro modified nucleotide
  modified_base 28: mod_base = OTHER; note = 2'-O-methyl modified nucleotide
  modified_base 29: mod_base = OTHER; note = 2'-fluoro modified nucleotide
  modified_base 30: mod_base = OTHER; note = 2'-O-methyl modified nucleotide
  modified_base 31: mod_base = OTHER; note = 2'-fluoro modified nucleotide with phosphorothioate linkage
  modified_base 32: mod_base = OTHER; note = 2'-O-methyl modified nucleotide with phosphorothioate linkage
  misc_difference 33: note = 2'-fluoro modified nucleotide with phosphorothioate linkage may be attached to trivalent N-Acetylgalactosamine

SEQ ID NO: 997 - RNA, 33 nt, synthetic construct
  source 1..33: mol_type = other RNA
  misc_difference 1: note = 2'-O-methyl modified nucleotide with phosphorothioate linkage may be modified with 5'-Phosphate
  modified_base 2: mod_base = OTHER; note = 2'-fluoro modified nucleotide with phosphorothioate linkage
  modified_base 3: mod_base = OTHER; note = 2'-O-methyl modified nucleotide
  modified_base 4: mod_base = OTHER; note = 2'-fluoro modified nucleotide
  modified_base 5: mod_base = OTHER; note = 2'-O-methyl modified nucleotide
  modified_base 6: mod_base = OTHER; note = 2'-fluoro modified nucleotide
  modified_base 7: mod_base = OTHER; note = 2'-O-methyl modified nucleotide
  modified_base 8: mod_base = OTHER; note = 2'-fluoro modified nucleotide
  modified_base 9: mod_base = OTHER; note = 2'-O-methyl modified nucleotide
  modified_base 10: mod_base = OTHER; note = 2'-fluoro modified nucleotide
  modified_base 11: mod_base = OTHER; note = 2'-O-methyl modified nucleotide
  modified_base 12: mod_base = OTHER; note = 2'-fluoro modified nucleotide
  modified_base 13: mod_base = OTHER; note = 2'-O-methyl modified nucleotide
  modified_base 14: mod_base = OTHER; note = 2'-fluoro modified nucleotide with phosphorothioate linkage
  modified_base 15: mod_base = OTHER; note = 2'-O-methyl modified nucleotide with phosphorothioate linkage
  modified_base 16: mod_base = OTHER; note = 2'-fluoro modified nucleotide with phosphorothioate linkage
  modified_base 17: mod_base = OTHER; note = 2'-O-methyl modified nucleotide with phosphorothioate linkage
  modified_base 18: mod_base = OTHER; note = 2'-fluoro modified nucleotide with phosphorothioate linkage
  modified_base 19: mod_base = OTHER; note = 2'-O-methyl modified nucleotide with phosphorothioate linkage
  modified_base 20: mod_base = OTHER; note = 2'-O-methyl modified nucleotide
  modified_base 21: mod_base = OTHER; note = 2'-fluoro modified nucleotide
  modified_base 22: mod_base = OTHER; note = 2'-O-methyl modified nucleotide
  modified_base 23: mod_base = OTHER; note = 2'-fluoro modified nucleotide
  modified_base 24: mod_base = OTHER; note = 2'-O-methyl modified nucleotide
  modified_base 25: mod_base = OTHER; note = 2'-fluoro modified nucleotide
  modified_base 26: mod_base = OTHER; note = 2'-O-methyl modified nucleotide
  modified_base 27: mod_base = OTHER; note = 2'-fluoro modified nucleotide
  modified_base 28: mod_base = OTHER; note = 2'-O-methyl modified nucleotide
  modified_base 29: mod_base = OTHER; note = 2'-fluoro modified nucleotide
  modified_base 30: mod_base = OTHER; note = 2'-O-methyl modified nucleotide
  modified_base 31: mod_base = OTHER; note = 2'-fluoro modified nucleotide with phosphorothioate linkage
  modified_base 32: mod_base = OTHER; note = 2'-O-methyl modified nucleotide with phosphorothioate linkage
  misc_difference 33: note = 2'-fluoro modified nucleotide with phosphorothioate linkage may be attached to trivalent N-Acetylgalactosamine
tccatgttgacgagttccgctcgtcaacatgga

SEQ ID NO: 998 - RNA, 33 nt, synthetic construct
  source 1..33: mol_type = other RNA
  misc_difference 1: note = 2'-O-methyl modified nucleotide with phosphorothioate linkage may be modified with 5'-Phosphate
  modified_base 2: mod_base = OTHER; note = 2'-fluoro modified nucleotide with phosphorothioate linkage
  modified_base 3: mod_base = OTHER; note = 2'-O-methyl modified nucleotide
  modified_base 4: mod_base = OTHER; note = 2'-fluoro modified nucleotide
  modified_base 5: mod_base = OTHER; note = 2'-O-methyl modified nucleotide
  modified_base 6: mod_base = OTHER; note = 2'-fluoro modified nucleotide
  modified_base 7: mod_base = OTHER; note = 2'-O-methyl modified nucleotide
  modified_base 8: mod_base = OTHER; note = 2'-fluoro modified nucleotide
  modified_base 9: mod_base = OTHER; note = 2'-O-methyl modified nucleotide
  modified_base 10: mod_base = OTHER; note = 2'-fluoro modified nucleotide
  modified_base 11: mod_base = OTHER; note = 2'-O-methyl modified nucleotide
  modified_base 12: mod_base = OTHER; note = 2'-fluoro modified nucleotide
  modified_base 13: mod_base = OTHER; note = 2'-O-methyl modified nucleotide
  modified_base 14: mod_base = OTHER; note = 2'-fluoro modified nucleotide with phosphorothioate linkage
  modified_base 15: mod_base = OTHER; note = 2'-O-methyl modified nucleotide with phosphorothioate linkage
  modified_base 16: mod_base = OTHER; note = 2'-fluoro modified nucleotide with phosphorothioate linkage
  modified_base 17: mod_base = OTHER; note = 2'-O-methyl modified nucleotide with phosphorothioate linkage
  modified_base 18: mod_base = OTHER; note = 2'-fluoro modified nucleotide with phosphorothioate linkage
  modified_base 19: mod_base = OTHER; note = 2'-O-methyl modified nucleotide with phosphorothioate linkage
  modified_base 20: mod_base = OTHER; note = 2'-O-methyl modified nucleotide
  modified_base 21: mod_base = OTHER; note = 2'-fluoro modified nucleotide
  modified_base 22: mod_base = OTHER; note = 2'-O-methyl modified nucleotide
  modified_base 23: mod_base = OTHER; note = 2'-fluoro modified nucleotide
  modified_base 24: mod_base = OTHER; note = 2'-O-methyl modified nucleotide
  modified_base 25: mod_base = OTHER; note = 2'-fluoro modified nucleotide
  modified_base 26: mod_base = OTHER; note = 2'-O-methyl modified nucleotide
  modified_base 27: mod_base = OTHER; note = 2'-fluoro modified nucleotide
  modified_base 28: mod_base = OTHER; note = 2'-O-methyl modified nucleotide
  modified_base 29: mod_base = OTHER; note = 2'-fluoro modified nucleotide
  modified_base 30: mod_base = OTHER; note = 2'-O-methyl modified nucleotide
  modified_base 31: mod_base = OTHER; note = 2'-fluoro modified nucleotide with phosphorothioate linkage
  modified_base 32: mod_base = OTHER; note = 2'-O-methyl modified nucleotide with phosphorothioate linkage
  misc_difference 33: note = 2'-fluoro modified nucleotide with phosphorothioate linkage may be attached to trivalent N-Acetylgalactosamine
tgatgcaggtaattgttggaattacctgcatca

SEQ ID NO: 999 - RNA, 33 nt, synthetic construct
  source 1..33: mol_type = other RNA
  misc_difference 1: note = 2'-O-methyl modified nucleotide with phosphorothioate linkage may be modified with 5'-Phosphate
  modified_base 2: mod_base = OTHER; note = 2'-fluoro modified nucleotide with phosphorothioate linkage
  modified_base 3: mod_base = OTHER; note = 2'-O-methyl modified nucleotide
  modified_base 4: mod_base = OTHER; note = 2'-fluoro modified nucleotide
  modified_base 5: mod_base = OTHER; note = 2'-O-methyl modified nucleotide
  modified_base 6: mod_base = OTHER; note = 2'-fluoro modified nucleotide
  modified_base 7: mod_base = OTHER; note = 2'-O-methyl modified nucleotide
  modified_base 8: mod_base = OTHER; note = 2'-fluoro modified nucleotide
  modified_base 9: mod_base = OTHER; note = 2'-O-methyl modified nucleotide
  modified_base 10: mod_base = OTHER; note = 2'-fluoro modified nucleotide
  modified_base 11: mod_base = OTHER; note = 2'-O-methyl modified nucleotide
  modified_base 12: mod_base = OTHER; note = 2'-fluoro modified nucleotide
  modified_base 13: mod_base = OTHER; note = 2'-O-methyl modified nucleotide
  modified_base 14: mod_base = OTHER; note = 2'-fluoro modified nucleotide with phosphorothioate linkage
  modified_base 15: mod_base = OTHER; note = 2'-O-methyl modified nucleotide with phosphorothioate linkage
  modified_base 16: mod_base = OTHER; note = 2'-fluoro modified nucleotide with phosphorothioate linkage
  modified_base 17: mod_base = OTHER; note = 2'-O-methyl modified nucleotide with phosphorothioate linkage
  modified_base 18: mod_base = OTHER; note = 2'-fluoro modified nucleotide with phosphorothioate linkage
  modified_base 19: mod_base = OTHER; note = 2'-O-methyl modified nucleotide with phosphorothioate linkage
  modified_base 20: mod_base = OTHER; note = 2'-O-methyl modified nucleotide
  modified_base 21: mod_base = OTHER; note = 2'-fluoro modified nucleotide
  modified_base 22: mod_base = OTHER; note = 2'-O-methyl modified nucleotide
  modified_base 23: mod_base = OTHER; note = 2'-fluoro modified nucleotide
  modified_base 24: mod_base = OTHER; note = 2'-O-methyl modified nucleotide
  modified_base 25: mod_base = OTHER; note = 2'-fluoro modified nucleotide
  modified_base 26: mod_base = OTHER; note = 2'-O-methyl modified nucleotide
  modified_base 27: mod_base = OTHER; note = 2'-fluoro modified nucleotide
  modified_base 28: mod_base = OTHER; note = 2'-O-methyl modified nucleotide
  modified_base 29: mod_base = OTHER; note = 2'-fluoro modified nucleotide
  modified_base 30: mod_base = OTHER; note = 2'-O-methyl modified nucleotide
  modified_base 31: mod_base = OTHER; note = 2'-fluoro modified nucleotide with phosphorothioate linkage
  modified_base 32: mod_base = OTHER; note = 2'-O-methyl modified nucleotide with phosphorothioate linkage
  misc_difference 33: note = 2'-fluoro modified nucleotide with phosphorothioate linkage may be attached to trivalent N-Acetylgalactosamine
tgtacctggtacagatctcctgtaccaggtaca

SEQ ID NO: 1000 - RNA, 33 nt, synthetic construct
  source 1..33: mol_type = other RNA
  misc_difference 1: note = 2'-O-methyl modified nucleotide with phosphorothioate linkage may be modified with 5'-Phosphate
  modified_base 2: mod_base = OTHER; note = 2'-fluoro modified nucleotide with phosphorothioate linkage
  modified_base 3: mod_base = OTHER; note = 2'-O-methyl modified nucleotide
  modified_base 4: mod_base = OTHER; note = 2'-fluoro modified nucleotide
  modified_base 5: mod_base = OTHER; note = 2'-O-methyl modified nucleotide
  modified_base 6: mod_base = OTHER; note = 2'-fluoro modified nucleotide
  modified_base 7: mod_base = OTHER; note = 2'-O-methyl modified nucleotide
  modified_base 8: mod_base = OTHER; note = 2'-fluoro modified nucleotide
  modified_base 9: mod_base = OTHER; note = 2'-O-methyl modified nucleotide
  modified_base 10: mod_base = OTHER; note = 2'-fluoro modified nucleotide
  modified_base 11: mod_base = OTHER; note = 2'-O-methyl modified nucleotide
  modified_base 12: mod_base = OTHER; note = 2'-fluoro modified nucleotide
  modified_base 13: mod_base = OTHER; note = 2'-O-methyl modified nucleotide
  modified_base 14: mod_base = OTHER; note = 2'-fluoro modified nucleotide with phosphorothioate linkage
  modified_base 15: mod_base = OTHER; note = 2'-O-methyl modified nucleotide with phosphorothioate linkage
  modified_base 16: mod_base = OTHER; note = 2'-fluoro modified nucleotide with phosphorothioate linkage
  modified_base 17: mod_base = OTHER; note = 2'-O-methyl modified nucleotide with phosphorothioate linkage
  modified_base 18: mod_base = OTHER; note = 2'-fluoro modified nucleotide with phosphorothioate linkage
  modified_base 19: mod_base = OTHER; note = 2'-O-methyl modified nucleotide with phosphorothioate linkage
  modified_base 20: mod_base = OTHER; note = 2'-O-methyl modified nucleotide
  modified_base 21: mod_base = OTHER; note = 2'-fluoro modified nucleotide
  modified_base 22: mod_base = OTHER; note = 2'-O-methyl modified nucleotide
  modified_base 23: mod_base = OTHER; note = 2'-fluoro modified nucleotide
  modified_base 24: mod_base = OTHER; note = 2'-O-methyl modified nucleotide
  modified_base 25: mod_base = OTHER; note = 2'-fluoro modified nucleotide
  modified_base 26: mod_base = OTHER; note = 2'-O-methyl modified nucleotide
  modified_base 27: mod_base = OTHER; note = 2'-fluoro modified nucleotide
  modified_base 28: mod_base = OTHER; note = 2'-O-methyl modified nucleotide
  modified_base 29: mod_base = OTHER; note = 2'-fluoro modified nucleotide
  modified_base 30: mod_base = OTHER; note = 2'-O-methyl modified nucleotide
  modified_base 31: mod_base = OTHER; note = 2'-fluoro modified nucleotide with phosphorothioate linkage
  modified_base 32: mod_base = OTHER; note = 2'-O-methyl modified nucleotide with phosphorothioate linkage
  misc_difference 33: note = 2'-fluoro modified nucleotide with phosphorothioate linkage may be attached to trivalent N-Acetylgalactosamine
ttaattgttggagttgcccactccaacaattaa

SEQ ID NO: 1001 - RNA, 33 nt, synthetic construct; identical to SEQ ID NO: 551
  source 1..33: mol_type = other RNA
  misc_difference 1: note = 2'-O-methyl modified nucleotide with phosphorothioate linkage may be modified with 5'-Phosphate
  modified_base 2: mod_base = OTHER; note = 2'-fluoro modified nucleotide with phosphorothioate linkage
  modified_base 3: mod_base = OTHER; note = 2'-O-methyl modified nucleotide
  modified_base 4: mod_base = OTHER; note = 2'-fluoro modified nucleotide
  modified_base 5: mod_base = OTHER; note = 2'-O-methyl modified nucleotide
  modified_base 6: mod_base = OTHER; note = 2'-fluoro modified nucleotide
  modified_base 7: mod_base = OTHER; note = 2'-O-methyl modified nucleotide
  modified_base 8: mod_base = OTHER; note = 2'-fluoro modified nucleotide
  modified_base 9: mod_base = OTHER; note = 2'-O-methyl modified nucleotide
  modified_base 10: mod_base = OTHER; note = 2'-fluoro modified nucleotide
  modified_base 11: mod_base = OTHER; note = 2'-O-methyl modified nucleotide
  modified_base 12: mod_base = OTHER; note = 2'-fluoro modified nucleotide
  modified_base 13: mod_base = OTHER; note = 2'-O-methyl modified nucleotide
  modified_base 14: mod_base = OTHER; note = 2'-fluoro modified nucleotide with phosphorothioate linkage
  modified_base 15: mod_base = OTHER; note = 2'-O-methyl modified nucleotide with phosphorothioate linkage
  modified_base 16: mod_base = OTHER; note = 2'-fluoro modified nucleotide with phosphorothioate linkage
  modified_base 17: mod_base = OTHER; note = 2'-O-methyl modified nucleotide with phosphorothioate linkage
  modified_base 18: mod_base = OTHER; note = 2'-fluoro modified nucleotide with phosphorothioate linkage
  modified_base 19: mod_base = OTHER; note = 2'-O-methyl modified nucleotide with phosphorothioate linkage
  modified_base 20: mod_base = OTHER; note = 2'-O-methyl modified nucleotide
  modified_base 21: mod_base = OTHER; note = 2'-fluoro modified nucleotide
  modified_base 22: mod_base = OTHER; note = 2'-O-methyl modified nucleotide
  modified_base 23: mod_base = OTHER; note = 2'-fluoro modified nucleotide
  modified_base 24: mod_base = OTHER; note = 2'-O-methyl modified nucleotide
  modified_base 25: mod_base = OTHER; note = 2'-fluoro modified nucleotide
  modified_base 26: mod_base = OTHER; note = 2'-O-methyl modified nucleotide
  modified_base 27: mod_base = OTHER; note = 2'-fluoro modified nucleotide
  modified_base 28: mod_base = OTHER; note = 2'-O-methyl modified nucleotide
  modified_base 29: mod_base = OTHER; note = 2'-fluoro modified nucleotide
  modified_base 30: mod_base = OTHER; note = 2'-O-methyl modified nucleotide
  modified_base 31: mod_base = OTHER; note = 2'-fluoro modified nucleotide with phosphorothioate linkage
  modified_base 32: mod_base = OTHER; note = 2'-O-methyl modified nucleotide with phosphorothioate linkage
  misc_difference 33: note = 2'-fluoro modified nucleotide with phosphorothioate linkage may be attached to trivalent N-Acetylgalactosamine

SEQ ID NO: 1002 - RNA, 33 nt, synthetic construct; identical to SEQ ID NO: 552
  source 1..33: mol_type = other RNA
  misc_difference 1: note = 2'-O-methyl modified nucleotide with phosphorothioate linkage may be modified with 5'-Phosphate
  modified_base 2: mod_base = OTHER; note = 2'-fluoro modified nucleotide with phosphorothioate linkage
  modified_base 3: mod_base = OTHER; note = 2'-O-methyl modified nucleotide
  modified_base 4: mod_base = OTHER; note = 2'-fluoro modified nucleotide
  modified_base 5: mod_base = OTHER; note = 2'-O-methyl modified nucleotide
  modified_base 6: mod_base = OTHER; note = 2'-fluoro modified nucleotide
  modified_base 7: mod_base = OTHER; note = 2'-O-methyl modified nucleotide
  modified_base 8: mod_base = OTHER; note = 2'-fluoro modified nucleotide
  modified_base 9: mod_base = OTHER; note = 2'-O-methyl modified nucleotide
  modified_base 10: mod_base = OTHER; note = 2'-fluoro modified nucleotide
  modified_base 11: mod_base = OTHER; note = 2'-O-methyl modified nucleotide
  modified_base 12: mod_base = OTHER; note = 2'-fluoro modified nucleotide
  modified_base 13: mod_base = OTHER; note = 2'-O-methyl modified nucleotide
  modified_base 14: mod_base = OTHER; note = 2'-fluoro modified nucleotide with phosphorothioate linkage
  modified_base 15: mod_base = OTHER; note = 2'-O-methyl modified nucleotide with phosphorothioate linkage
  modified_base 16: mod_base = OTHER; note = 2'-fluoro modified nucleotide with phosphorothioate linkage
  modified_base 17: mod_base = OTHER; note = 2'-O-methyl modified nucleotide with phosphorothioate linkage
  modified_base 18: mod_base = OTHER; note = 2'-fluoro modified nucleotide with phosphorothioate linkage
  modified_base 19: mod_base = OTHER; note = 2'-O-methyl modified nucleotide with phosphorothioate linkage
  modified_base 20: mod_base = OTHER; note = 2'-O-methyl modified nucleotide
  modified_base 21: mod_base = OTHER; note = 2'-fluoro modified nucleotide
  modified_base 22: mod_base = OTHER; note = 2'-O-methyl modified nucleotide
  modified_base 23: mod_base = OTHER; note = 2'-fluoro modified nucleotide
  modified_base 24: mod_base = OTHER; note = 2'-O-methyl modified nucleotide
  modified_base 25: mod_base = OTHER; note = 2'-fluoro modified nucleotide
  modified_base 26: mod_base = OTHER; note = 2'-O-methyl modified nucleotide
  modified_base 27: mod_base = OTHER; note = 2'-fluoro modified nucleotide
  modified_base 28: mod_base = OTHER; note = 2'-O-methyl modified nucleotide
  modified_base 29: mod_base = OTHER; note = 2'-fluoro modified nucleotide
  modified_base 30: mod_base = OTHER; note = 2'-O-methyl modified nucleotide
  modified_base 31: mod_base = OTHER; note = 2'-fluoro modified nucleotide with phosphorothioate linkage
  modified_base 32: mod_base = OTHER; note = 2'-O-methyl modified nucleotide with phosphorothioate linkage
  misc_difference 33: note = 2'-fluoro modified nucleotide with phosphorothioate linkage may be attached to trivalent N-Acetylgalactosamine

SEQ ID NO: 1003 - RNA, 33 nt, synthetic construct
  source 1..33: mol_type = other RNA
  misc_difference 1: note = 2'-O-methyl modified nucleotide with phosphorothioate linkage may be modified with 5'-Phosphate
  modified_base 2: mod_base = OTHER; note = 2'-fluoro modified nucleotide with phosphorothioate linkage
  modified_base 3: mod_base = OTHER; note = 2'-O-methyl modified nucleotide
  modified_base 4: mod_base = OTHER; note = 2'-fluoro modified nucleotide
  modified_base 5: mod_base = OTHER; note = 2'-O-methyl modified nucleotide
  modified_base 6: mod_base = OTHER; note = 2'-fluoro modified nucleotide
  modified_base 7: mod_base = OTHER; note = 2'-O-methyl modified nucleotide
  modified_base 8: mod_base = OTHER; note = 2'-fluoro modified nucleotide
  modified_base 9: mod_base = OTHER; note = 2'-O-methyl modified nucleotide
  modified_base 10: mod_base = OTHER; note = 2'-fluoro modified nucleotide
  modified_base 11: mod_base = OTHER; note = 2'-O-methyl modified nucleotide
  modified_base 12: mod_base = OTHER; note = 2'-fluoro modified nucleotide
  modified_base 13: mod_base = OTHER; note = 2'-O-methyl modified nucleotide
  modified_base 14: mod_base = OTHER; note = 2'-fluoro modified nucleotide with phosphorothioate linkage
  modified_base 15: mod_base = OTHER; note = 2'-O-methyl modified nucleotide with phosphorothioate linkage
  modified_base 16: mod_base = OTHER; note = 2'-fluoro modified nucleotide with phosphorothioate linkage
  modified_base 17: mod_base = OTHER; note = 2'-O-methyl modified nucleotide with phosphorothioate linkage
  modified_base 18: mod_base = OTHER; note = 2'-fluoro modified nucleotide with phosphorothioate linkage
  modified_base 19: mod_base = OTHER; note = 2'-O-methyl modified nucleotide with phosphorothioate linkage
  modified_base 20: mod_base = OTHER; note = 2'-O-methyl modified nucleotide
  modified_base 21: mod_base = OTHER; note = 2'-fluoro modified nucleotide
  modified_base 22: mod_base = OTHER; note = 2'-O-methyl modified nucleotide
  modified_base 23: mod_base = OTHER; note = 2'-fluoro modified nucleotide
  modified_base 24: mod_base = OTHER; note = 2'-O-methyl modified nucleotide
  modified_base 25: mod_base = OTHER; note = 2'-fluoro modified nucleotide
  modified_base 26: mod_base = OTHER; note = 2'-O-methyl modified nucleotide
  modified_base 27: mod_base = OTHER; note = 2'-fluoro modified nucleotide
  modified_base 28: mod_base = OTHER; note = 2'-O-methyl modified nucleotide
  modified_base 29: mod_base = OTHER; note = 2'-fluoro modified nucleotide
  modified_base 30: mod_base = OTHER; note = 2'-O-methyl modified nucleotide
  modified_base 31: mod_base = OTHER; note = 2'-fluoro modified nucleotide with phosphorothioate linkage
  modified_base 32: mod_base = OTHER; note = 2'-O-methyl modified nucleotide with phosphorothioate linkage
  misc_difference 33: note = 2'-fluoro modified nucleotide with phosphorothioate linkage may be attached to trivalent N-Acetylgalactosamine
tgaatttctctgtaggctctacagagaaattca

SEQ ID NO: 1004 - RNA, 33 nt, synthetic construct; identical to SEQ ID NO: 554
  source 1..33: mol_type = other RNA
  misc_difference 1: note = 2'-O-methyl modified nucleotide with phosphorothioate linkage may be modified with 5'-Phosphate
  modified_base 2: mod_base = OTHER; note = 2'-fluoro modified nucleotide with phosphorothioate linkage
  modified_base 3: mod_base = OTHER; note = 2'-O-methyl modified nucleotide
  modified_base 4: mod_base = OTHER; note = 2'-fluoro modified nucleotide
  modified_base 5: mod_base = OTHER; note = 2'-O-methyl modified nucleotide
  modified_base 6: mod_base = OTHER; note = 2'-fluoro modified nucleotide
  modified_base 7: mod_base = OTHER; note = 2'-O-methyl modified nucleotide
  modified_base 8: mod_base = OTHER; note = 2'-fluoro modified nucleotide
  modified_base 9: mod_base = OTHER; note = 2'-O-methyl modified nucleotide
  modified_base 10: mod_base = OTHER; note = 2'-fluoro modified nucleotide
  modified_base 11: mod_base = OTHER; note = 2'-O-methyl modified nucleotide
  modified_base 12: mod_base = OTHER; note = 2'-fluoro modified nucleotide
  modified_base 13: mod_base = OTHER; note = 2'-O-methyl modified nucleotide
  modified_base 14: mod_base = OTHER; note = 2'-fluoro modified nucleotide with phosphorothioate linkage
  modified_base 15: mod_base = OTHER; note = 2'-O-methyl modified nucleotide with phosphorothioate linkage
  modified_base 16: mod_base = OTHER; note = 2'-fluoro modified nucleotide with phosphorothioate linkage
  modified_base 17: mod_base = OTHER; note = 2'-O-methyl modified nucleotide with phosphorothioate linkage
  modified_base 18: mod_base = OTHER; note = 2'-fluoro modified nucleotide with phosphorothioate linkage
  modified_base 19: mod_base = OTHER; note = 2'-O-methyl modified nucleotide with phosphorothioate linkage
  modified_base 20: mod_base = OTHER; note = 2'-O-methyl modified nucleotide
  modified_base 21: mod_base = OTHER; note = 2'-fluoro modified nucleotide
  modified_base 22: mod_base = OTHER; note = 2'-O-methyl modified nucleotide
  modified_base 23: mod_base = OTHER; note = 2'-fluoro modified nucleotide
  modified_base 24: mod_base = OTHER; note = 2'-O-methyl modified nucleotide
  modified_base 25: mod_base = OTHER; note = 2'-fluoro modified nucleotide
  modified_base 26: mod_base = OTHER; note = 2'-O-methyl modified nucleotide
  modified_base 27: mod_base = OTHER; note = 2'-fluoro modified nucleotide
  modified_base 28: mod_base = OTHER; note = 2'-O-methyl modified nucleotide
  modified_base 29: mod_base = OTHER; note = 2'-fluoro modified nucleotide
  modified_base 30: mod_base = OTHER; note = 2'-O-methyl modified nucleotide
  modified_base 31: mod_base = OTHER; note = 2'-fluoro modified nucleotide with phosphorothioate linkage
  modified_base 32: mod_base = OTHER; note = 2'-O-methyl modified nucleotide with phosphorothioate linkage
  misc_difference 33: note = 2'-fluoro modified nucleotide with phosphorothioate linkage may be attached to trivalent N-Acetylgalactosamine

SEQ ID NO: 1005 - RNA, 33 nt, synthetic construct
  source 1..33: mol_type = other RNA
  misc_difference 1: note = 2'-O-methyl modified nucleotide with phosphorothioate linkage may be modified with 5'-Phosphate
  modified_base 2: mod_base = OTHER; note = 2'-fluoro modified nucleotide with phosphorothioate linkage
  modified_base 3: mod_base = OTHER; note = 2'-O-methyl modified nucleotide
  modified_base 4: mod_base = OTHER; note = 2'-fluoro modified nucleotide
  modified_base 5: mod_base = OTHER; note = 2'-O-methyl modified nucleotide
  modified_base 6: mod_base = OTHER; note = 2'-fluoro modified nucleotide
  modified_base 7: mod_base = OTHER; note = 2'-O-methyl modified nucleotide
  modified_base 8: mod_base = OTHER; note = 2'-fluoro modified nucleotide
  modified_base 9: mod_base = OTHER; note = 2'-O-methyl modified nucleotide
  modified_base 10: mod_base = OTHER; note = 2'-fluoro modified nucleotide
  modified_base 11: mod_base = OTHER; note = 2'-O-methyl modified nucleotide
  modified_base 12: mod_base = OTHER; note = 2'-fluoro modified nucleotide
  modified_base 13: mod_base = OTHER; note = 2'-O-methyl modified nucleotide
  modified_base 14: mod_base = OTHER; note = 2'-fluoro modified nucleotide with phosphorothioate linkage
  modified_base 15: mod_base = OTHER; note = 2'-O-methyl modified nucleotide with phosphorothioate linkage
  modified_base 16: mod_base = OTHER; note = 2'-fluoro modified nucleotide with phosphorothioate linkage
  modified_base 17: mod_base = OTHER; note = 2'-O-methyl modified nucleotide with phosphorothioate linkage
  modified_base 18: mod_base = OTHER; note = 2'-fluoro modified nucleotide with phosphorothioate linkage
  modified_base 19: mod_base = OTHER; note = 2'-O-methyl modified nucleotide with phosphorothioate linkage
  modified_base 20: mod_base = OTHER; note = 2'-O-methyl modified nucleotide
  modified_base 21: mod_base = OTHER; note = 2'-fluoro modified nucleotide
  modified_base 22: mod_base = OTHER; note = 2'-O-methyl modified nucleotide
  modified_base 23: mod_base = OTHER; note = 2'-fluoro modified nucleotide
  modified_base 24: mod_base = OTHER; note = 2'-O-methyl modified nucleotide
  modified_base 25: mod_base = OTHER; note = 2'-fluoro modified nucleotide
  modified_base 26: mod_base = OTHER; note = 2'-O-methyl modified nucleotide
  modified_base 27: mod_base = OTHER; note = 2'-fluoro modified nucleotide
  modified_base 28: mod_base = OTHER; note = 2'-O-methyl modified nucleotide
  modified_base 29: mod_base = OTHER; note = 2'-fluoro modified nucleotide
  modified_base 30: mod_base = OTHER; note = 2'-O-methyl modified nucleotide
  modified_base 31: mod_base = OTHER; note = 2'-fluoro modified nucleotide with phosphorothioate linkage
  modified_base 32: mod_base = OTHER; note = 2'-O-methyl modified nucleotide with phosphorothioate linkage
  misc_difference 33: note = 2'-fluoro modified nucleotide with phosphorothioate linkage may be attached to trivalent N-Acetylgalactosamine
tcgagttccggaatgtcccattccggaactcga

SEQ ID NO: 1006 - RNA, 33 nt, synthetic construct
  source 1..33: mol_type = other RNA
  misc_difference 1: note = 2'-O-methyl modified nucleotide with phosphorothioate linkage may be modified with 5'-Phosphate
  modified_base 2: mod_base = OTHER; note = 2'-fluoro modified nucleotide with phosphorothioate linkage
  modified_base 3: mod_base = OTHER; note = 2'-O-methyl modified nucleotide
  modified_base 4: mod_base = OTHER; note = 2'-fluoro modified nucleotide
  modified_base 5: mod_base = OTHER; note = 2'-O-methyl modified nucleotide
  modified_base 6: mod_base = OTHER; note = 2'-fluoro modified nucleotide
  modified_base 7: mod_base = OTHER; note = 2'-O-methyl modified nucleotide
  modified_base 8: mod_base = OTHER; note = 2'-fluoro modified nucleotide
  modified_base 9: mod_base = OTHER; note = 2'-O-methyl modified nucleotide
  modified_base 10: mod_base = OTHER; note = 2'-fluoro modified nucleotide
  modified_base 11: mod_base = OTHER; note = 2'-O-methyl modified nucleotide
  modified_base 12: mod_base = OTHER; note = 2'-fluoro modified nucleotide
  modified_base 13: mod_base = OTHER; note = 2'-O-methyl modified nucleotide
  modified_base 14: mod_base = OTHER; note = 2'-fluoro modified nucleotide with phosphorothioate linkage
  modified_base 15: mod_base = OTHER; note = 2'-O-methyl modified nucleotide with phosphorothioate linkage
  modified_base 16: mod_base = OTHER; note = 2'-fluoro modified nucleotide with phosphorothioate linkage
  modified_base 17: mod_base = OTHER; note = 2'-O-methyl modified nucleotide with phosphorothioate linkage
  modified_base 18: mod_base = OTHER; note = 2'-fluoro modified nucleotide with phosphorothioate linkage
  modified_base 19: mod_base = OTHER; note = 2'-O-methyl modified nucleotide with phosphorothioate linkage
  modified_base 20: mod_base = OTHER; note = 2'-O-methyl modified nucleotide
  modified_base 21: mod_base = OTHER; note = 2'-fluoro modified nucleotide
  modified_base 22: mod_base = OTHER; note = 2'-O-methyl modified nucleotide
  modified_base 23: mod_base = OTHER; note = 2'-fluoro modified nucleotide
  modified_base 24: mod_base = OTHER; note = 2'-O-methyl modified nucleotide
  modified_base 25: mod_base = OTHER; note = 2'-fluoro modified nucleotide
  modified_base 26: mod_base = OTHER; note = 2'-O-methyl modified nucleotide
  modified_base 27: mod_base = OTHER; note = 2'-fluoro modified nucleotide
  modified_base 28: mod_base = OTHER; note = 2'-O-methyl modified nucleotide
  modified_base 29: mod_base = OTHER; note = 2'-fluoro modified nucleotide
  modified_base 30: mod_base = OTHER; note = 2'-O-methyl modified nucleotide
  modified_base 31: mod_base = OTHER; note = 2'-fluoro modified nucleotide with phosphorothioate linkage
  modified_base 32: mod_base = OTHER; note = 2'-O-methyl modified nucleotide with phosphorothioate linkage
  misc_difference 33: note = 2'-fluoro modified nucleotide with phosphorothioate linkage may be attached to trivalent N-Acetylgalactosamine
taagcaattctcctcagcaaggagaattgctta

SEQ ID NO: 1007 - RNA, 33 nt, synthetic construct
  source 1..33: mol_type = other RNA
  misc_difference 1: note = 2'-O-methyl modified nucleotide with phosphorothioate linkage may be modified with 5'-Phosphate
  modified_base 2: mod_base = OTHER; note = 2'-fluoro modified nucleotide with phosphorothioate linkage
  modified_base 3: mod_base = OTHER; note = 2'-O-methyl modified nucleotide
  modified_base 4: mod_base = OTHER; note = 2'-fluoro modified nucleotide
  modified_base 5: mod_base = OTHER; note = 2'-O-methyl modified nucleotide
  modified_base 6: mod_base = OTHER; note = 2'-fluoro modified nucleotide
  modified_base 7: mod_base = OTHER; note = 2'-O-methyl modified nucleotide
  modified_base 8: mod_base = OTHER; note = 2'-fluoro modified nucleotide
  modified_base 9: mod_base = OTHER; note = 2'-O-methyl modified nucleotide
  modified_base 10: mod_base = OTHER; note = 2'-fluoro modified nucleotide
  modified_base 11: mod_base = OTHER; note = 2'-O-methyl modified nucleotide
  modified_base 12: mod_base = OTHER; note = 2'-fluoro modified nucleotide
  modified_base 13: mod_base = OTHER; note = 2'-O-methyl modified nucleotide
  modified_base 14: mod_base = OTHER; note = 2'-fluoro modified nucleotide with phosphorothioate linkage
  modified_base 15: mod_base = OTHER; note = 2'-O-methyl modified nucleotide with phosphorothioate linkage
  modified_base 16: mod_base = OTHER; note = 2'-fluoro modified nucleotide with phosphorothioate linkage
  modified_base 17: mod_base = OTHER; note = 2'-O-methyl modified nucleotide with phosphorothioate linkage
  modified_base 18: mod_base = OTHER; note = 2'-fluoro modified nucleotide with phosphorothioate linkage
  modified_base 19: mod_base = OTHER; note = 2'-O-methyl modified nucleotide with phosphorothioate linkage
  modified_base 20: mod_base = OTHER; note = 2'-O-methyl modified nucleotide
  modified_base 21: mod_base = OTHER; note = 2'-fluoro modified nucleotide
  modified_base 22: mod_base = OTHER; note = 2'-O-methyl modified nucleotide
  modified_base 23: mod_base = OTHER; note = 2'-fluoro modified nucleotide
  modified_base 24: mod_base = OTHER; note = 2'-O-methyl modified nucleotide
  modified_base 25: mod_base = OTHER; note = 2'-fluoro modified nucleotide
  modified_base 26: mod_base = OTHER; note = 2'-O-methyl modified nucleotide
  modified_base 27: mod_base = OTHER; note = 2'-fluoro modified nucleotide
  modified_base 28: mod_base = OTHER; note = 2'-O-methyl modified nucleotide
  modified_base 29: mod_base = OTHER; note = 2'-fluoro modified nucleotide
  modified_base 30: mod_base = OTHER; note = 2'-O-methyl modified nucleotide
  modified_base 31: mod_base = OTHER; note = 2'-fluoro modified nucleotide with phosphorothioate linkage
  modified_base 32: mod_base = OTHER; note = 2'-O-methyl modified nucleotide with phosphorothioate linkage
  misc_difference 33: note = 2'-fluoro modified nucleotide with phosphorothioate linkage may be attached to trivalent N-Acetylgalactosamine
taacgatgttctcttctgcagagaacatcgtta

SEQ ID NO: 1008 - RNA, 33 nt, synthetic construct; identical to SEQ ID NO: 558
  source 1..33: mol_type = other RNA
  misc_difference 1: note = 2'-O-methyl modified nucleotide with phosphorothioate linkage may be modified with 5'-Phosphate
  modified_base 2: mod_base = OTHER; note = 2'-fluoro modified nucleotide with phosphorothioate linkage
  modified_base 3: mod_base = OTHER; note = 2'-O-methyl modified nucleotide
  modified_base 4: mod_base = OTHER; note = 2'-fluoro modified nucleotide
  modified_base 5: mod_base = OTHER; note = 2'-O-methyl modified nucleotide
  modified_base 6: mod_base = OTHER; note = 2'-fluoro modified nucleotide
  modified_base 7: mod_base = OTHER; note = 2'-O-methyl modified nucleotide
  modified_base 8: mod_base = OTHER; note = 2'-fluoro modified nucleotide
  modified_base 9: mod_base = OTHER; note = 2'-O-methyl modified nucleotide
  modified_base 10: mod_base = OTHER; note = 2'-fluoro modified nucleotide
  modified_base 11: mod_base = OTHER; note = 2'-O-methyl modified nucleotide
  modified_base 12: mod_base = OTHER; note = 2'-fluoro modified nucleotide
  modified_base 13: mod_base = OTHER; note = 2'-O-methyl modified nucleotide
  modified_base 14: mod_base = OTHER; note = 2'-fluoro modified nucleotide with phosphorothioate linkage
  modified_base 15: mod_base = OTHER; note = 2'-O-methyl modified nucleotide with phosphorothioate linkage
  modified_base 16: mod_base = OTHER; note = 2'-fluoro modified nucleotide with phosphorothioate linkage
  modified_base 17: mod_base = OTHER; note = 2'-O-methyl modified nucleotide with phosphorothioate linkage
  modified_base 18: mod_base = OTHER; note = 2'-fluoro modified nucleotide with phosphorothioate linkage
  modified_base 19: mod_base = OTHER; note = 2'-O-methyl modified nucleotide with phosphorothioate linkage
  modified_base 20: mod_base = OTHER; note = 2'-O-methyl modified nucleotide
  modified_base 21: mod_base = OTHER; note = 2'-fluoro modified nucleotide
  modified_base 22: mod_base = OTHER; note = 2'-O-methyl modified nucleotide
  modified_base 23: mod_base = OTHER; note = 2'-fluoro modified nucleotide
  modified_base 24: mod_base = OTHER; note = 2'-O-methyl modified nucleotide
  modified_base 25: mod_base = OTHER; note = 2'-fluoro modified nucleotide
  modified_base 26: mod_base = OTHER; note = 2'-O-methyl modified nucleotide
  modified_base 27: mod_base = OTHER; note = 2'-fluoro modified nucleotide
  modified_base 28: mod_base = OTHER; note = 2'-O-methyl modified nucleotide
  modified_base 29: mod_base = OTHER; note = 2'-fluoro modified nucleotide
  modified_base 30: mod_base = OTHER; note = 2'-O-methyl modified nucleotide
  modified_base 31: mod_base = OTHER; note = 2'-fluoro modified nucleotide with phosphorothioate linkage
  modified_base 32: mod_base = OTHER; note = 2'-O-methyl modified nucleotide with phosphorothioate linkage
  misc_difference 33: note = 2'-fluoro modified nucleotide with phosphorothioate linkage may be attached to trivalent N-Acetylgalactosamine

SEQ ID NO: 1009 - RNA, 33 nt, synthetic construct
  source 1..33: mol_type = other RNA
  misc_difference 1: note = 2'-O-methyl modified nucleotide with phosphorothioate linkage may be modified with 5'-Phosphate
  modified_base 2: mod_base = OTHER; note = 2'-fluoro modified nucleotide with phosphorothioate linkage
  modified_base 3: mod_base = OTHER; note = 2'-O-methyl modified nucleotide
  modified_base 4: mod_base = OTHER; note = 2'-fluoro modified nucleotide
  modified_base 5: mod_base = OTHER; note = 2'-O-methyl modified nucleotide
  modified_base 6: mod_base = OTHER; note = 2'-fluoro modified nucleotide
  modified_base 7: mod_base = OTHER; note = 2'-O-methyl modified nucleotide
  modified_base 8: mod_base = OTHER; note = 2'-fluoro modified nucleotide
  modified_base 9: mod_base = OTHER; note = 2'-O-methyl modified nucleotide
  modified_base 10: mod_base = OTHER; note = 2'-fluoro modified nucleotide
  modified_base 11: mod_base = OTHER; note = 2'-O-methyl modified nucleotide
  modified_base 12: mod_base = OTHER; note = 2'-fluoro modified nucleotide
  modified_base 13: mod_base = OTHER; note = 2'-O-methyl modified nucleotide
  modified_base 14: mod_base = OTHER; note = 2'-fluoro modified nucleotide with phosphorothioate linkage
  modified_base 15: mod_base = OTHER; note = 2'-O-methyl modified nucleotide with phosphorothioate linkage
  modified_base 16: mod_base = OTHER; note = 2'-fluoro modified nucleotide with phosphorothioate linkage
  modified_base 17: mod_base = OTHER; note = 2'-O-methyl modified nucleotide with phosphorothioate linkage
  modified_base 18: mod_base = OTHER; note = 2'-fluoro modified nucleotide with phosphorothioate linkage
  modified_base 19: mod_base = OTHER; note = 2'-O-methyl modified nucleotide with phosphorothioate linkage
  modified_base 20: mod_base = OTHER; note = 2'-O-methyl modified nucleotide
  modified_base 21: mod_base = OTHER; note = 2'-fluoro modified nucleotide
  modified_base 22: mod_base = OTHER; note = 2'-O-methyl modified nucleotide
  modified_base 23: mod_base = OTHER; note = 2'-fluoro modified nucleotide
  modified_base 24: mod_base = OTHER; note = 2'-O-methyl modified nucleotide
  modified_base 25: mod_base = OTHER; note = 2'-fluoro modified nucleotide
  modified_base 26: mod_base = OTHER; note = 2'-O-methyl modified nucleotide
  modified_base 27: mod_base = OTHER; note = 2'-fluoro modified nucleotide
  modified_base 28: mod_base = OTHER; note = 2'-O-methyl modified nucleotide
  modified_base 29: mod_base = OTHER; note = 2'-fluoro modified nucleotide
  modified_base 30: mod_base = OTHER; note = 2'-O-methyl modified nucleotide
  modified_base 31: mod_base = OTHER; note = 2'-fluoro modified nucleotide with phosphorothioate linkage
  modified_base 32: mod_base = OTHER; note = 2'-O-methyl modified nucleotide with phosphorothioate linkage
  misc_difference 33: note = 2'-fluoro modified nucleotide with phosphorothioate linkage may be attached to trivalent N-Acetylgalactosamine
tagagcttgttcagctttcctgaacaagctcta

SEQ ID NO: 1010 - RNA, 33 nt, synthetic construct
  source 1..33: mol_type = other RNA
  misc_difference 1: note = 2'-O-methyl modified nucleotide with phosphorothioate linkage may be modified with 5'-Phosphate
  modified_base 2: mod_base = OTHER; note = 2'-fluoro modified nucleotide with phosphorothioate linkage
  modified_base 3: mod_base = OTHER; note = 2'-O-methyl modified nucleotide
  modified_base 4: mod_base = OTHER; note = 2'-fluoro modified nucleotide
  modified_base 5: mod_base = OTHER; note = 2'-O-methyl modified nucleotide
  modified_base 6: mod_base = OTHER; note = 2'-fluoro modified nucleotide
  modified_base 7: mod_base = OTHER; note = 2'-O-methyl modified nucleotide
  modified_base 8: mod_base = OTHER; note = 2'-fluoro modified nucleotide
  modified_base 9: mod_base = OTHER; note = 2'-O-methyl modified nucleotide
  modified_base 10: mod_base = OTHER; note = 2'-fluoro modified nucleotide
  modified_base 11: mod_base = OTHER; note = 2'-O-methyl modified nucleotide
  modified_base 12: mod_base = OTHER; note = 2'-fluoro modified nucleotide
  modified_base 13: mod_base = OTHER; note = 2'-O-methyl modified nucleotide
  modified_base 14: mod_base = OTHER; note = 2'-fluoro modified nucleotide with phosphorothioate linkage
  modified_base 15: mod_base = OTHER; note = 2'-O-methyl modified nucleotide with phosphorothioate linkage
  modified_base 16: mod_base = OTHER; note = 2'-fluoro modified nucleotide with phosphorothioate linkage
  modified_base 17: mod_base = OTHER; note = 2'-O-methyl modified nucleotide with phosphorothioate linkage
  modified_base 18: mod_base = OTHER; note = 2'-fluoro modified nucleotide with phosphorothioate linkage
  modified_base 19: mod_base = OTHER; note = 2'-O-methyl modified nucleotide with phosphorothioate linkage
  modified_base 20: mod_base = OTHER; note = 2'-O-methyl modified nucleotide
  modified_base 21: mod_base = OTHER; note = 2'-fluoro modified nucleotide
  modified_base 22: mod_base = OTHER; note = 2'-O-methyl modified nucleotide
  modified_base 23: mod_base = OTHER; note = 2'-fluoro modified nucleotide
  modified_base 24: mod_base = OTHER; note = 2'-O-methyl modified nucleotide
  modified_base 25: mod_base = OTHER; note = 2'-fluoro modified nucleotide
  modified_base 26: mod_base = OTHER; note = 2'-O-methyl modified nucleotide
  modified_base 27: mod_base = OTHER; note = 2'-fluoro modified nucleotide
  modified_base 28: mod_base = OTHER; note = 2'-O-methyl modified nucleotide
  modified_base 29: mod_base = OTHER; note = 2'-fluoro modified nucleotide
  modified_base 30: mod_base = OTHER; note = 2'-O-methyl modified nucleotide
  modified_base 31: mod_base = OTHER; note = 2'-fluoro modified nucleotide with phosphorothioate linkage
  modified_base 32: mod_base = OTHER; note = 2'-O-methyl modified nucleotide with phosphorothioate linkage
  misc_difference 33: note = 2'-fluoro modified nucleotide with phosphorothioate linkage may be attached to trivalent N-Acetylgalactosamine
ttagacatagtggcatcctgccactatgtctaa

SEQ ID NO: 1011 - RNA, 33 nt, synthetic construct
  source 1..33: mol_type = other RNA
  misc_difference 1: note = 2'-O-methyl modified nucleotide with phosphorothioate linkage may be modified with 5'-Phosphate
  modified_base 2: mod_base = OTHER; note = 2'-fluoro modified nucleotide with phosphorothioate linkage
  modified_base 3: mod_base = OTHER; note = 2'-O-methyl modified nucleotide
  modified_base 4: mod_base = OTHER; note = 2'-fluoro modified nucleotide
  modified_base 5: mod_base = OTHER; note = 2'-O-methyl modified nucleotide
  modified_base 6: mod_base = OTHER; note = 2'-fluoro modified nucleotide
  modified_base 7: mod_base = OTHER; note = 2'-O-methyl modified nucleotide
  modified_base 8: mod_base = OTHER; note = 2'-fluoro modified nucleotide
  modified_base 9: mod_base = OTHER; note = 2'-O-methyl modified nucleotide
  modified_base 10: mod_base = OTHER; note = 2'-fluoro modified nucleotide
  modified_base 11: mod_base = OTHER; note = 2'-O-methyl modified nucleotide
  modified_base 12: mod_base = OTHER; note = 2'-fluoro modified nucleotide
  modified_base 13: mod_base = OTHER; note = 2'-O-methyl modified nucleotide
  modified_base 14: mod_base = OTHER; note = 2'-fluoro modified nucleotide with phosphorothioate linkage
  modified_base 15: mod_base = OTHER; note = 2'-O-methyl modified nucleotide with phosphorothioate linkage
  modified_base 16: mod_base = OTHER; note = 2'-fluoro modified nucleotide with phosphorothioate linkage
  modified_base 17: mod_base = OTHER; note = 2'-O-methyl modified nucleotide with phosphorothioate linkage
  modified_base 18: mod_base = OTHER; note = 2'-fluoro modified nucleotide with phosphorothioate linkage
  modified_base 19: mod_base = OTHER; note = 2'-O-methyl modified nucleotide with phosphorothioate linkage
  modified_base 20: mod_base = OTHER; note = 2'-O-methyl modified nucleotide
  modified_base 21: mod_base = OTHER; note = 2'-fluoro modified nucleotide
  modified_base 22: mod_base = OTHER; note = 2'-O-methyl modified nucleotide
  modified_base 23: mod_base = OTHER; note = 2'-fluoro modified nucleotide
  modified_base 24: mod_base = OTHER; note = 2'-O-methyl modified nucleotide
  modified_base 25: mod_base = OTHER; note = 2'-fluoro modified nucleotide
  modified_base 26: mod_base = OTHER; note = 2'-O-methyl modified nucleotide
  modified_base 27: mod_base = OTHER; note = 2'-fluoro modified nucleotide
  modified_base 28: mod_base = OTHER; note = 2'-O-methyl modified nucleotide
  modified_base 29: mod_base = OTHER; note = 2'-fluoro modified nucleotide
  modified_base 30: mod_base = OTHER; note = 2'-O-methyl modified nucleotide
  modified_base 31: mod_base = OTHER; note = 2'-fluoro modified nucleotide with phosphorothioate linkage
  modified_base 32: mod_base = OTHER; note = 2'-O-methyl modified nucleotide with phosphorothioate linkage
  misc_difference 33: note = 2'-fluoro modified nucleotide with phosphorothioate linkage may be attached to trivalent N-Acetylgalactosamine
tggtaattgttggagttgctccaacaattacca

SEQ ID NO: 1012 - RNA, 33 nt, synthetic construct; identical to SEQ ID NO: 562
  source 1..33: mol_type = other RNA
  misc_difference 1: note = 2'-O-methyl modified nucleotide with phosphorothioate linkage may be modified with 5'-Phosphate
  modified_base 2: mod_base = OTHER; note = 2'-fluoro modified nucleotide with phosphorothioate linkage
  modified_base 3: mod_base = OTHER; note = 2'-O-methyl modified nucleotide
  modified_base 4: mod_base = OTHER; note = 2'-fluoro modified nucleotide
  modified_base 5: mod_base = OTHER; note = 2'-O-methyl modified nucleotide
  modified_base 6: mod_base = OTHER; note = 2'-fluoro modified nucleotide
  modified_base 7: mod_base = OTHER; note = 2'-O-methyl modified nucleotide
  modified_base 8: mod_base = OTHER; note = 2'-fluoro modified nucleotide
  modified_base 9: mod_base = OTHER; note = 2'-O-methyl modified nucleotide
  modified_base 10: mod_base = OTHER; note = 2'-fluoro modified nucleotide
  modified_base 11: mod_base = OTHER; note = 2'-O-methyl modified nucleotide
  modified_base 12: mod_base = OTHER; note = 2'-fluoro modified nucleotide
  modified_base 13: mod_base = OTHER; note = 2'-O-methyl modified nucleotide
  modified_base 14: mod_base = OTHER; note = 2'-fluoro modified nucleotide with phosphorothioate linkage
  modified_base 15: mod_base = OTHER; note = 2'-O-methyl modified nucleotide with phosphorothioate linkage
  modified_base 16: mod_base = OTHER; note = 2'-fluoro modified nucleotide with phosphorothioate linkage
  modified_base 17: mod_base = OTHER; note = 2'-O-methyl modified nucleotide with phosphorothioate linkage
  modified_base 18: mod_base = OTHER; note = 2'-fluoro modified nucleotide with phosphorothioate linkage
  modified_base 19: mod_base = OTHER; note = 2'-O-methyl modified nucleotide with phosphorothioate linkage
  modified_base 20: mod_base = OTHER; note = 2'-O-methyl modified nucleotide
  modified_base 21: mod_base = OTHER; note = 2'-fluoro modified nucleotide
  modified_base 22: mod_base = OTHER; note = 2'-O-methyl modified nucleotide
  modified_base 23: mod_base = OTHER; note = 2'-fluoro modified nucleotide
  modified_base 24: mod_base = OTHER; note = 2'-O-methyl modified nucleotide
  modified_base 25: mod_base = OTHER; note = 2'-fluoro modified nucleotide
  modified_base 26: mod_base = OTHER; note = 2'-O-methyl modified nucleotide
  modified_base 27: mod_base = OTHER; note = 2'-fluoro modified nucleotide
  modified_base 28: mod_base = OTHER; note = 2'-O-methyl modified nucleotide
  modified_base 29: mod_base = OTHER; note = 2'-fluoro modified nucleotide
  modified_base 30: mod_base = OTHER; note = 2'-O-methyl modified nucleotide
  modified_base 31: mod_base = OTHER; note = 2'-fluoro modified nucleotide with phosphorothioate linkage
  modified_base 32: mod_base = OTHER; note = 2'-O-methyl modified nucleotide with phosphorothioate linkage
  misc_difference 33: note = 2'-fluoro modified nucleotide with phosphorothioate linkage may be attached to trivalent N-Acetylgalactosamine

SEQ ID NO: 1013 - RNA, 33 nt, synthetic construct; identical to SEQ ID NO: 563
  source 1..33: mol_type = other RNA
  misc_difference 1: note = 2'-O-methyl modified nucleotide with phosphorothioate linkage may be modified with 5'-Phosphate
  modified_base 2: mod_base = OTHER; note = 2'-fluoro modified nucleotide with phosphorothioate linkage
  modified_base 3: mod_base = OTHER; note = 2'-O-methyl modified nucleotide
  modified_base 4: mod_base = OTHER; note = 2'-fluoro modified nucleotide
  modified_base 5: mod_base = OTHER; note = 2'-O-methyl modified nucleotide
  modified_base 6: mod_base = OTHER; note = 2'-fluoro modified nucleotide
  modified_base 7: mod_base = OTHER; note = 2'-O-methyl modified nucleotide
  modified_base 8: mod_base = OTHER; note = 2'-fluoro modified nucleotide
  modified_base 9: mod_base = OTHER; note = 2'-O-methyl modified nucleotide
  modified_base 10: mod_base = OTHER; note = 2'-fluoro modified nucleotide
  modified_base 11: mod_base = OTHER; note = 2'-O-methyl modified nucleotide
  modified_base 12: mod_base = OTHER; note = 2'-fluoro modified nucleotide
  modified_base 13: mod_base = OTHER; note = 2'-O-methyl modified nucleotide
  modified_base 14: mod_base = OTHER; note = 2'-fluoro modified nucleotide with phosphorothioate linkage
  modified_base 15: mod_base = OTHER; note = 2'-O-methyl modified nucleotide with phosphorothioate linkage
  modified_base 16: mod_base = OTHER; note = 2'-fluoro modified nucleotide with phosphorothioate linkage
  modified_base 17: mod_base = OTHER; note = 2'-O-methyl modified nucleotide with phosphorothioate linkage
  modified_base 18: mod_base = OTHER; note = 2'-fluoro modified nucleotide with phosphorothioate linkage
  modified_base 19: mod_base = OTHER; note = 2'-O-methyl modified nucleotide with phosphorothioate linkage
  modified_base 20: mod_base = OTHER; note = 2'-O-methyl modified nucleotide
  modified_base 21: mod_base = OTHER; note = 2'-fluoro modified nucleotide
  modified_base 22: mod_base = OTHER; note = 2'-O-methyl modified nucleotide
  modified_base 23: mod_base = OTHER; note = 2'-fluoro modified nucleotide
  modified_base 24: mod_base = OTHER; note = 2'-O-methyl modified nucleotide
  modified_base 25: mod_base = OTHER; note = 2'-fluoro modified nucleotide
  modified_base 26: mod_base = OTHER; note = 2'-O-methyl modified nucleotide
  modified_base 27: mod_base = OTHER; note = 2'-fluoro modified nucleotide
  modified_base 28: mod_base = OTHER; note = 2'-O-methyl modified nucleotide
  modified_base 29: mod_base = OTHER; note = 2'-fluoro modified nucleotide
  modified_base 30: mod_base = OTHER; note = 2'-O-methyl modified nucleotide
  modified_base 31: mod_base = OTHER; note = 2'-fluoro modified nucleotide with phosphorothioate linkage
  modified_base 32: mod_base = OTHER; note = 2'-O-methyl modified nucleotide with phosphorothioate linkage
  misc_difference 33: note = 2'-fluoro modified nucleotide with phosphorothioate linkage may be attached to trivalent N-Acetylgalactosamine

SEQ ID NO: 1014 - RNA, 33 nt, synthetic construct
  source 1..33: mol_type = other RNA
  misc_difference 1: note = 2'-O-methyl modified nucleotide with phosphorothioate linkage may be modified with 5'-Phosphate
  modified_base 2: mod_base = OTHER; note = 2'-fluoro modified nucleotide with phosphorothioate linkage
  modified_base 3: mod_base = OTHER; note = 2'-O-methyl modified nucleotide
  modified_base 4: mod_base = OTHER; note = 2'-fluoro modified nucleotide
  modified_base 5: mod_base = OTHER; note = 2'-O-methyl modified nucleotide
  modified_base 6: mod_base = OTHER; note = 2'-fluoro modified nucleotide
  modified_base 7: mod_base = OTHER; note = 2'-O-methyl modified nucleotide
  modified_base 8: mod_base = OTHER; note = 2'-fluoro modified nucleotide
  modified_base 9: mod_base = OTHER; note = 2'-O-methyl modified nucleotide
  modified_base 10: mod_base = OTHER; note = 2'-fluoro modified nucleotide
  modified_base 11: mod_base = OTHER; note = 2'-O-methyl modified nucleotide
  modified_base 12: mod_base = OTHER; note = 2'-fluoro modified nucleotide
  modified_base 13: mod_base = OTHER; note = 2'-O-methyl modified nucleotide
  modified_base 14: mod_base = OTHER; note = 2'-fluoro modified nucleotide with phosphorothioate linkage
  modified_base 15: mod_base = OTHER; note = 2'-O-methyl modified nucleotide with phosphorothioate linkage
  modified_base 16: mod_base = OTHER; note = 2'-fluoro modified nucleotide with phosphorothioate linkage
  modified_base 17: mod_base = OTHER; note = 2'-O-methyl modified nucleotide with phosphorothioate linkage
  modified_base 18: mod_base = OTHER; note = 2'-fluoro modified nucleotide with phosphorothioate linkage
  modified_base 19: mod_base = OTHER; note = 2'-O-methyl modified nucleotide with phosphorothioate linkage
  modified_base 20: mod_base = OTHER; note = 2'-O-methyl modified nucleotide
  modified_base 21: mod_base = OTHER; note = 2'-fluoro modified nucleotide
  modified_base 22: mod_base = OTHER; note = 2'-O-methyl modified nucleotide
  modified_base 23: mod_base = OTHER; note = 2'-fluoro modified nucleotide
  modified_base 24: mod_base = OTHER; note = 2'-O-methyl modified nucleotide
  modified_base 25: mod_base = OTHER; note = 2'-fluoro modified nucleotide
  modified_base 26: mod_base = OTHER; note = 2'-O-methyl modified nucleotide
  modified_base 27: mod_base = OTHER; note = 2'-fluoro modified nucleotide
  modified_base 28: mod_base = OTHER; note = 2'-O-methyl modified nucleotide
  modified_base 29: mod_base = OTHER; note = 2'-fluoro modified nucleotide
  modified_base 30: mod_base = OTHER; note = 2'-O-methyl modified nucleotide
  modified_base 31: mod_base = OTHER; note = 2'-fluoro modified nucleotide with phosphorothioate linkage
  modified_base 32: mod_base = OTHER; note = 2'-O-methyl modified nucleotide with phosphorothioate linkage
  misc_difference 33: note = 2'-fluoro modified nucleotide with phosphorothioate linkage may be attached to trivalent N-Acetylgalactosamine
tatcatagtgttcttggcaagaacactatgata

SEQ ID NO: 1015 - RNA, 33 nt, synthetic construct
  source 1..33: mol_type = other RNA
  misc_difference 1: note = 2'-O-methyl modified nucleotide with phosphorothioate linkage may be modified with 5'-Phosphate
  modified_base 2: mod_base = OTHER; note = 2'-fluoro modified nucleotide with phosphorothioate linkage
  modified_base 3: mod_base = OTHER; note = 2'-O-methyl modified nucleotide
  modified_base 4: mod_base = OTHER; note = 2'-fluoro modified nucleotide
  modified_base 5: mod_base = OTHER; note = 2'-O-methyl modified nucleotide
  modified_base 6: mod_base = OTHER; note = 2'-fluoro modified nucleotide
  modified_base 7: mod_base = OTHER; note = 2'-O-methyl modified nucleotide
  modified_base 8: mod_base = OTHER; note = 2'-fluoro modified nucleotide
  modified_base 9: mod_base = OTHER; note = 2'-O-methyl modified nucleotide
  modified_base 10: mod_base = OTHER; note = 2'-fluoro modified nucleotide
  modified_base 11: mod_base = OTHER; note = 2'-O-methyl modified nucleotide
  modified_base 12: mod_base = OTHER; note = 2'-fluoro modified nucleotide
  modified_base 13: mod_base = OTHER; note = 2'-O-methyl modified nucleotide
  modified_base 14: mod_base = OTHER; note = 2'-fluoro modified nucleotide with phosphorothioate linkage
  modified_base 15: mod_base = OTHER; note = 2'-O-methyl modified nucleotide with phosphorothioate linkage
  modified_base 16: mod_base = OTHER; note = 2'-fluoro modified nucleotide with phosphorothioate linkage
  modified_base 17: mod_base = OTHER; note = 2'-O-methyl modified nucleotide with phosphorothioate linkage
  modified_base 18: mod_base = OTHER; note = 2'-fluoro modified nucleotide with phosphorothioate linkage
  modified_base 19: mod_base = OTHER; note = 2'-O-methyl modified nucleotide with phosphorothioate linkage
  modified_base 20: mod_base = OTHER; note = 2'-O-methyl modified nucleotide
  modified_base 21: mod_base = OTHER; note = 2'-fluoro modified nucleotide
  modified_base 22: mod_base = OTHER; note = 2'-O-methyl modified nucleotide
  modified_base 23: mod_base = OTHER; note = 2'-fluoro modified nucleotide
  modified_base 24: mod_base = OTHER; note = 2'-O-methyl modified nucleotide
  modified_base 25: mod_base = OTHER; note = 2'-fluoro modified nucleotide
  modified_base 26: mod_base = OTHER; note = 2'-O-methyl modified nucleotide
  modified_base 27: mod_base = OTHER; note = 2'-fluoro modified nucleotide
  modified_base 28: mod_base = OTHER; note = 2'-O-methyl modified nucleotide
  modified_base 29: mod_base = OTHER; note = 2'-fluoro modified nucleotide
  modified_base 30: mod_base = OTHER; note = 2'-O-methyl modified nucleotide
  modified_base 31: mod_base = OTHER; note = 2'-fluoro modified nucleotide with phosphorothioate linkage
  modified_base 32: mod_base = OTHER; note = 2'-O-methyl modified nucleotide with phosphorothioate linkage
  misc_difference 33: note = 2'-fluoro modified nucleotide with phosphorothioate linkage may be attached to trivalent N-Acetylgalactosamine
tgtgctggttttatggtgaataaaaccagcaca

SEQ ID NO: 1016 - RNA, 33 nt, synthetic construct
  source 1..33: mol_type = other RNA
  misc_difference 1: note = 2'-O-methyl modified nucleotide with phosphorothioate linkage may be modified with 5'-Phosphate
  modified_base 2: mod_base = OTHER; note = 2'-fluoro modified nucleotide with phosphorothioate linkage
  modified_base 3: mod_base = OTHER; note = 2'-O-methyl modified nucleotide
  modified_base 4: mod_base = OTHER; note = 2'-fluoro modified nucleotide
  modified_base 5: mod_base = OTHER; note = 2'-O-methyl modified nucleotide
  modified_base 6: mod_base = OTHER; note = 2'-fluoro modified nucleotide
  modified_base 7: mod_base = OTHER; note = 2'-O-methyl modified nucleotide
  modified_base 8: mod_base = OTHER; note = 2'-fluoro modified nucleotide
  modified_base 9: mod_base = OTHER; note = 2'-O-methyl modified nucleotide
  modified_base 10: mod_base = OTHER; note = 2'-fluoro modified nucleotide
  modified_base 11: mod_base = OTHER; note = 2'-O-methyl modified nucleotide
  modified_base 12: mod_base = OTHER; note = 2'-fluoro modified nucleotide
  modified_base 13: mod_base = OTHER; note = 2'-O-methyl modified nucleotide
  modified_base 14: mod_base = OTHER; note = 2'-fluoro modified nucleotide with phosphorothioate linkage
  modified_base 15: mod_base = OTHER; note = 2'-O-methyl modified nucleotide with phosphorothioate linkage
  modified_base 16: mod_base = OTHER; note = 2'-fluoro modified nucleotide with phosphorothioate linkage
  modified_base 17: mod_base = OTHER; note = 2'-O-methyl modified nucleotide with phosphorothioate linkage
  modified_base 18: mod_base = OTHER; note = 2'-fluoro modified nucleotide with phosphorothioate linkage
  modified_base 19: mod_base = OTHER; note = 2'-O-methyl modified nucleotide with phosphorothioate linkage
  modified_base 20: mod_base = OTHER; note = 2'-O-methyl modified nucleotide
  modified_base 21: mod_base = OTHER; note = 2'-fluoro modified nucleotide
  modified_base 22: mod_base = OTHER; note = 2'-O-methyl modified nucleotide
  modified_base 23: mod_base = OTHER; note = 2'-fluoro modified nucleotide
  modified_base 24: mod_base = OTHER; note = 2'-O-methyl modified nucleotide
  modified_base 25: mod_base = OTHER; note = 2'-fluoro modified nucleotide
  modified_base 26: mod_base = OTHER; note = 2'-O-methyl modified nucleotide
  modified_base 27: mod_base = OTHER; note = 2'-fluoro modified nucleotide
  modified_base 28: mod_base = OTHER; note = 2'-O-methyl modified nucleotide
  modified_base 29: mod_base = OTHER; note = 2'-fluoro modified nucleotide
  modified_base 30: mod_base = OTHER; note = 2'-O-methyl modified nucleotide
  modified_base 31: mod_base = OTHER; note = 2'-fluoro modified nucleotide with phosphorothioate linkage
  modified_base 32: mod_base = OTHER; note = 2'-O-methyl modified nucleotide with phosphorothioate linkage
  misc_difference 33: note = 2'-fluoro modified nucleotide with phosphorothioate linkage may be attached to trivalent N-Acetylgalactosamine
taaagggcattcctggtttaggaatgcccttta

SEQ ID NO: 1017 - RNA, 33 nt, synthetic construct; identical to SEQ ID NO: 567
  source 1..33: mol_type = other RNA
  misc_difference 1: note = 2'-O-methyl modified nucleotide with phosphorothioate linkage may be modified with 5'-Phosphate
  modified_base 2: mod_base = OTHER; note = 2'-fluoro modified nucleotide with phosphorothioate linkage
  modified_base 3: mod_base = OTHER; note = 2'-O-methyl modified nucleotide
  modified_base 4: mod_base = OTHER; note = 2'-fluoro modified nucleotide
  modified_base 5: mod_base = OTHER; note = 2'-O-methyl modified nucleotide
  modified_base 6: mod_base = OTHER; note = 2'-fluoro modified nucleotide
  modified_base 7: mod_base = OTHER; note = 2'-O-methyl modified nucleotide
  modified_base 8: mod_base = OTHER; note = 2'-fluoro modified nucleotide
  modified_base 9: mod_base = OTHER; note = 2'-O-methyl modified nucleotide
  modified_base 10: mod_base = OTHER; note = 2'-fluoro modified nucleotide
  modified_base 11: mod_base = OTHER; note = 2'-O-methyl modified nucleotide
  modified_base 12: mod_base = OTHER; note = 2'-fluoro modified nucleotide
  modified_base 13: mod_base = OTHER; note = 2'-O-methyl modified nucleotide
  modified_base 14: mod_base = OTHER; note = 2'-fluoro modified nucleotide with phosphorothioate linkage
  modified_base 15: mod_base = OTHER; note = 2'-O-methyl modified nucleotide with phosphorothioate linkage
  modified_base 16: mod_base = OTHER; note = 2'-fluoro modified nucleotide with phosphorothioate linkage
  modified_base 17: mod_base = OTHER; note = 2'-O-methyl modified nucleotide with phosphorothioate linkage
  modified_base 18: mod_base = OTHER; note = 2'-fluoro modified nucleotide with phosphorothioate linkage
  modified_base 19: mod_base = OTHER; note = 2'-O-methyl modified nucleotide with phosphorothioate linkage
  modified_base 20: mod_base = OTHER; note = 2'-O-methyl modified nucleotide
  modified_base 21: mod_base = OTHER; note = 2'-fluoro modified nucleotide
  modified_base 22: mod_base = OTHER; note = 2'-O-methyl modified nucleotide
  modified_base 23: mod_base = OTHER; note = 2'-fluoro modified nucleotide
  modified_base 24: mod_base = OTHER; note = 2'-O-methyl modified nucleotide
  modified_base 25: mod_base = OTHER; note = 2'-fluoro modified nucleotide
  modified_base 26: mod_base = OTHER; note = 2'-O-methyl modified nucleotide
  modified_base 27: mod_base = OTHER; note = 2'-fluoro modified nucleotide
  modified_base 28: mod_base = OTHER; note = 2'-O-methyl modified nucleotide
  modified_base 29: mod_base = OTHER; note = 2'-fluoro modified nucleotide
  modified_base 30: mod_base = OTHER; note = 2'-O-methyl modified nucleotide
  modified_base 31: mod_base = OTHER; note = 2'-fluoro modified nucleotide with phosphorothioate linkage
  modified_base 32: mod_base = OTHER; note = 2'-O-methyl modified nucleotide with phosphorothioate linkage
  misc_difference 33: note = 2'-fluoro modified nucleotide with phosphorothioate linkage may be attached to trivalent N-Acetylgalactosamine

SEQ ID NO: 1018 - RNA, 33 nt, synthetic construct
  source 1..33: mol_type = other RNA
  misc_difference 1: note = 2'-O-methyl modified nucleotide with phosphorothioate linkage may be modified with 5'-Phosphate
  modified_base 2: mod_base = OTHER; note = 2'-fluoro modified nucleotide with phosphorothioate linkage
  modified_base 3: mod_base = OTHER; note = 2'-O-methyl modified nucleotide
  modified_base 4: mod_base = OTHER; note = 2'-fluoro modified nucleotide
  modified_base 5: mod_base = OTHER; note = 2'-O-methyl modified nucleotide
  modified_base 6: mod_base = OTHER; note = 2'-fluoro modified nucleotide
  modified_base 7: mod_base = OTHER; note = 2'-O-methyl modified nucleotide
  modified_base 8: mod_base = OTHER; note = 2'-fluoro modified nucleotide
  modified_base 9: mod_base = OTHER; note = 2'-O-methyl modified nucleotide
  modified_base 10: mod_base = OTHER; note = 2'-fluoro modified nucleotide
  modified_base 11: mod_base = OTHER; note = 2'-O-methyl modified nucleotide
  modified_base 12: mod_base = OTHER; note = 2'-fluoro modified nucleotide
  modified_base 13: mod_base = OTHER; note = 2'-O-methyl modified nucleotide
  modified_base 14: mod_base = OTHER; note = 2'-fluoro modified nucleotide with phosphorothioate linkage
  modified_base 15: mod_base = OTHER; note = 2'-O-methyl modified nucleotide with phosphorothioate linkage
  modified_base 16: mod_base = OTHER; note = 2'-fluoro modified nucleotide with phosphorothioate linkage
  modified_base 17: mod_base = OTHER; note = 2'-O-methyl modified nucleotide with phosphorothioate linkage
  modified_base 18: mod_base = OTHER; note = 2'-fluoro modified nucleotide with phosphorothioate linkage
  modified_base 19: mod_base = OTHER; note = 2'-O-methyl modified nucleotide with phosphorothioate linkage
  modified_base 20: mod_base = OTHER; note = 2'-O-methyl modified nucleotide
  modified_base 21: mod_base = OTHER; note = 2'-fluoro modified nucleotide
  modified_base 22: mod_base = OTHER; note = 2'-O-methyl modified nucleotide
  modified_base 23: mod_base = OTHER; note = 2'-fluoro modified nucleotide
  modified_base 24: mod_base = OTHER; note = 2'-O-methyl modified nucleotide
  modified_base 25: mod_base = OTHER; note = 2'-fluoro modified nucleotide
  modified_base 26: mod_base = OTHER; note = 2'-O-methyl modified nucleotide
  modified_base 27: mod_base = OTHER; note = 2'-fluoro modified nucleotide
  modified_base 28: mod_base = OTHER; note = 2'-O-methyl modified nucleotide
  modified_base 29: mod_base = OTHER; note = 2'-fluoro modified nucleotide
  modified_base 30: mod_base = OTHER; note = 2'-O-methyl modified nucleotide
  modified_base 31: mod_base = OTHER; note = 2'-fluoro modified nucleotide with phosphorothioate linkage
  modified_base 32: mod_base = OTHER; note = 2'-O-methyl modified nucleotide with phosphorothioate linkage
  misc_difference 33: note = 2'-fluoro modified nucleotide with phosphorothioate linkage may be attached to trivalent N-Acetylgalactosamine
taagtcttttagctgcagtagctaaaagactta

SEQ ID NO: 1019 - RNA, 33 nt, synthetic construct
  source 1..33: mol_type = other RNA
  misc_difference 1: note = 2'-O-methyl modified nucleotide with phosphorothioate linkage may be modified with 5'-Phosphate
  modified_base 2: mod_base = OTHER; note = 2'-fluoro modified nucleotide with phosphorothioate linkage
  modified_base 3: mod_base = OTHER; note = 2'-O-methyl modified nucleotide
  modified_base 4: mod_base = OTHER; note = 2'-fluoro modified nucleotide
  modified_base 5: mod_base = OTHER; note = 2'-O-methyl modified nucleotide
  modified_base 6: mod_base = OTHER; note = 2'-fluoro modified nucleotide
  modified_base 7: mod_base = OTHER; note = 2'-O-methyl modified nucleotide
  modified_base 8: mod_base = OTHER; note = 2'-fluoro modified nucleotide
  modified_base 9: mod_base = OTHER; note = 2'-O-methyl modified nucleotide
  modified_base 10: mod_base = OTHER; note = 2'-fluoro modified nucleotide
  modified_base 11: mod_base = OTHER; note = 2'-O-methyl modified nucleotide
  modified_base 12: mod_base = OTHER; note = 2'-fluoro modified nucleotide
  modified_base 13: mod_base = OTHER; note = 2'-O-methyl modified nucleotide
  modified_base 14: mod_base = OTHER; note = 2'-fluoro modified nucleotide with phosphorothioate linkage
  modified_base 15: mod_base = OTHER; note = 2'-O-methyl modified nucleotide with phosphorothioate linkage
  modified_base 16: mod_base = OTHER; note = 2'-fluoro modified nucleotide with phosphorothioate linkage
  modified_base 17: mod_base = OTHER; note = 2'-O-methyl modified nucleotide with phosphorothioate linkage
  modified_base 18: mod_base = OTHER; note = 2'-fluoro modified nucleotide with phosphorothioate linkage
  modified_base 19: mod_base = OTHER; note = 2'-O-methyl modified nucleotide with phosphorothioate linkage
  modified_base 20: mod_base = OTHER; note = 2'-O-methyl modified nucleotide
  modified_base 21: mod_base = OTHER; note = 2'-fluoro modified nucleotide
  modified_base 22: mod_base = OTHER; note = 2'-O-methyl modified nucleotide
  modified_base 23: mod_base = OTHER; note = 2'-fluoro modified nucleotide
  modified_base 24: mod_base = OTHER; note = 2'-O-methyl modified nucleotide
  modified_base 25: mod_base = OTHER; note = 2'-fluoro modified nucleotide
  modified_base 26: mod_base = OTHER; note = 2'-O-methyl modified nucleotide
  modified_base 27: mod_base = OTHER; note = 2'-fluoro modified nucleotide
  modified_base 28: mod_base = OTHER; note = 2'-O-methyl modified nucleotide
  modified_base 29: mod_base = OTHER; note = 2'-fluoro modified nucleotide
  modified_base 30: mod_base = OTHER; note = 2'-O-methyl modified nucleotide
  modified_base 31: mod_base = OTHER; note = 2'-fluoro modified nucleotide with phosphorothioate linkage
  modified_base 32: mod_base = OTHER; note = 2'-O-methyl modified nucleotide with phosphorothioate linkage
  misc_difference 33: note = 2'-fluoro modified nucleotide with phosphorothioate linkage may be attached to trivalent N-Acetylgalactosamine
ttgggttgtctgaaggccattcagacaacccaa

SEQ ID NO: 1020 - RNA, 33 nt, synthetic construct; identical to SEQ ID NO: 570
  source 1..33: mol_type = other RNA
  misc_difference 1: note = 2'-O-methyl modified nucleotide with phosphorothioate linkage may be modified with 5'-Phosphate
  modified_base 2: mod_base = OTHER; note = 2'-fluoro modified nucleotide with phosphorothioate linkage
  modified_base 3: mod_base = OTHER; note = 2'-O-methyl modified nucleotide
  modified_base 4: mod_base = OTHER; note = 2'-fluoro modified nucleotide
  modified_base 5: mod_base = OTHER; note = 2'-O-methyl modified nucleotide
  modified_base 6: mod_base = OTHER; note = 2'-fluoro modified nucleotide
  modified_base 7: mod_base = OTHER; note = 2'-O-methyl modified nucleotide
  modified_base 8: mod_base = OTHER; note = 2'-fluoro modified nucleotide
  modified_base 9: mod_base = OTHER; note = 2'-O-methyl modified nucleotide
  modified_base 10: mod_base = OTHER; note = 2'-fluoro modified nucleotide
  modified_base 11: mod_base = OTHER; note = 2'-O-methyl modified nucleotide
  modified_base 12: mod_base = OTHER; note = 2'-fluoro modified nucleotide
  modified_base 13: mod_base = OTHER; note = 2'-O-methyl modified nucleotide
  modified_base 14: mod_base = OTHER; note = 2'-fluoro modified nucleotide with phosphorothioate linkage
  modified_base 15: mod_base = OTHER; note = 2'-O-methyl modified nucleotide with phosphorothioate linkage
  modified_base 16: mod_base = OTHER; note = 2'-fluoro modified nucleotide with phosphorothioate linkage
  modified_base 17: mod_base = OTHER; note = 2'-O-methyl modified nucleotide with phosphorothioate linkage
  modified_base 18: mod_base = OTHER; note = 2'-fluoro modified nucleotide with phosphorothioate linkage
  modified_base 19: mod_base = OTHER; note = 2'-O-methyl modified nucleotide with phosphorothioate linkage
  modified_base 20: mod_base = OTHER; note = 2'-O-methyl modified nucleotide
  modified_base 21: mod_base = OTHER; note = 2'-fluoro modified nucleotide
  modified_base 22: mod_base = OTHER; note = 2'-O-methyl modified nucleotide
  modified_base 23: mod_base = OTHER; note = 2'-fluoro modified nucleotide
  modified_base 24: mod_base = OTHER; note = 2'-O-methyl modified nucleotide
  modified_base 25: mod_base = OTHER; note = 2'-fluoro modified nucleotide
  modified_base 26: mod_base = OTHER; note = 2'-O-methyl modified nucleotide
  modified_base 27: mod_base = OTHER; note = 2'-fluoro modified nucleotide
  modified_base 28: mod_base = OTHER; note = 2'-O-methyl modified nucleotide
  modified_base 29: mod_base = OTHER; note = 2'-fluoro modified nucleotide
  modified_base 30: mod_base = OTHER; note = 2'-O-methyl modified nucleotide
  modified_base 31: mod_base = OTHER; note = 2'-fluoro modified nucleotide with phosphorothioate linkage
  modified_base 32: mod_base = OTHER; note = 2'-O-methyl modified nucleotide with phosphorothioate linkage
  misc_difference 33: note = 2'-fluoro modified nucleotide with phosphorothioate linkage may be attached to trivalent N-Acetylgalactosamine

SEQ ID NO: 1021 - RNA, 33 nt, synthetic construct
  source 1..33: mol_type = other RNA
  misc_difference 1: note = 2'-O-methyl modified nucleotide with phosphorothioate linkage may be modified with 5'-Phosphate
  modified_base 2: mod_base = OTHER; note = 2'-fluoro modified nucleotide with phosphorothioate linkage
  modified_base 3: mod_base = OTHER; note = 2'-O-methyl modified nucleotide
  modified_base 4: mod_base = OTHER; note = 2'-fluoro modified nucleotide
  modified_base 5: mod_base = OTHER; note = 2'-O-methyl modified nucleotide
  modified_base 6: mod_base = OTHER; note = 2'-fluoro modified nucleotide
  modified_base 7: mod_base = OTHER; note = 2'-O-methyl modified nucleotide
  modified_base 8: mod_base = OTHER; note = 2'-fluoro modified nucleotide
  modified_base 9: mod_base = OTHER; note = 2'-O-methyl modified nucleotide
  modified_base 10: mod_base = OTHER; note = 2'-fluoro modified nucleotide
  modified_base 11: mod_base = OTHER; note = 2'-O-methyl modified nucleotide
  modified_base 12: mod_base = OTHER; note = 2'-fluoro modified nucleotide
  modified_base 13: mod_base = OTHER; note = 2'-O-methyl modified nucleotide
  modified_base 14: mod_base = OTHER; note = 2'-fluoro modified nucleotide with phosphorothioate linkage
  modified_base 15: mod_base = OTHER; note = 2'-O-methyl modified nucleotide with phosphorothioate linkage
  modified_base 16: mod_base = OTHER; note = 2'-fluoro modified nucleotide with phosphorothioate linkage
  modified_base 17: mod_base = OTHER; note = 2'-O-methyl modified nucleotide with phosphorothioate linkage
  modified_base 18: mod_base = OTHER; note = 2'-fluoro modified nucleotide with phosphorothioate linkage
  modified_base 19: mod_base = OTHER; note = 2'-O-methyl modified nucleotide with phosphorothioate linkage
  modified_base 20: mod_base = OTHER; note = 2'-O-methyl modified nucleotide
  modified_base 21: mod_base = OTHER; note = 2'-fluoro modified nucleotide
  modified_base 22: mod_base = OTHER; note = 2'-O-methyl modified nucleotide
  modified_base 23: mod_base = OTHER; note = 2'-fluoro modified nucleotide
  modified_base 24: mod_base = OTHER; note = 2'-O-methyl modified nucleotide
  modified_base 25: mod_base = OTHER; note = 2'-fluoro modified nucleotide
  modified_base 26: mod_base = OTHER; note = 2'-O-methyl modified nucleotide
  modified_base 27: mod_base = OTHER; note = 2'-fluoro modified nucleotide
  modified_base 28: mod_base = OTHER; note = 2'-O-methyl modified nucleotide
  modified_base 29: mod_base = OTHER; note = 2'-fluoro modified nucleotide
  modified_base 30: mod_base = OTHER; note = 2'-O-methyl modified nucleotide
  modified_base 31: mod_base = OTHER; note = 2'-fluoro modified nucleotide with phosphorothioate linkage
  modified_base 32: mod_base = OTHER; note = 2'-O-methyl modified nucleotide with phosphorothioate linkage
  misc_difference 33: note = 2'-fluoro modified nucleotide with phosphorothioate linkage may be attached to trivalent N-Acetylgalactosamine
tgaagtcctgcattactgtaatgcaggacttca

SEQ ID NO: 1022 - RNA, 33 nt, synthetic construct
  source 1..33: mol_type = other RNA
  misc_difference 1: note = 2'-O-methyl modified nucleotide with phosphorothioate linkage may be modified with 5'-Phosphate
  modified_base 2: mod_base = OTHER; note = 2'-fluoro modified nucleotide with phosphorothioate linkage
  modified_base 3: mod_base = OTHER; note = 2'-O-methyl modified nucleotide
  modified_base 4: mod_base = OTHER; note = 2'-fluoro modified nucleotide
  modified_base 5: mod_base = OTHER; note = 2'-O-methyl modified nucleotide
  modified_base 6: mod_base = OTHER; note = 2'-fluoro modified nucleotide
  modified_base 7: mod_base = OTHER; note = 2'-O-methyl modified nucleotide
  modified_base 8: mod_base = OTHER; note = 2'-fluoro modified nucleotide
  modified_base 9: mod_base = OTHER; note = 2'-O-methyl modified nucleotide
  modified_base 10: mod_base = OTHER; note = 2'-fluoro modified nucleotide
  modified_base 11: mod_base = OTHER; note = 2'-O-methyl modified nucleotide
  modified_base 12: mod_base = OTHER; note = 2'-fluoro modified nucleotide
  modified_base 13: mod_base = OTHER; note = 2'-O-methyl modified nucleotide
  modified_base 14: mod_base = OTHER; note = 2'-fluoro modified nucleotide with phosphorothioate linkage
  modified_base 15: mod_base = OTHER; note = 2'-O-methyl modified nucleotide with phosphorothioate linkage
  modified_base 16: mod_base = OTHER; note = 2'-fluoro modified nucleotide with phosphorothioate linkage
  modified_base 17: mod_base = OTHER; note = 2'-O-methyl modified nucleotide with phosphorothioate linkage
  modified_base 18: mod_base = OTHER; note = 2'-fluoro modified nucleotide with phosphorothioate linkage
  modified_base 19: mod_base = OTHER; note = 2'-O-methyl modified nucleotide with phosphorothioate linkage
  modified_base 20: mod_base = OTHER; note = 2'-O-methyl modified nucleotide
  modified_base 21: mod_base = OTHER; note = 2'-fluoro modified nucleotide
  modified_base 22: mod_base = OTHER; note = 2'-O-methyl modified nucleotide
  modified_base 23: mod_base = OTHER; note = 2'-fluoro modified nucleotide
  modified_base 24: mod_base = OTHER; note = 2'-O-methyl modified nucleotide
  modified_base 25: mod_base = OTHER; note = 2'-fluoro modified nucleotide
  modified_base 26: mod_base = OTHER; note = 2'-O-methyl modified nucleotide
  modified_base 27: mod_base = OTHER; note = 2'-fluoro modified nucleotide
  modified_base 28: mod_base = OTHER; note = 2'-O-methyl modified nucleotide
  modified_base 29: mod_base = OTHER; note = 2'-fluoro modified nucleotide
  modified_base 30: mod_base = OTHER; note = 2'-O-methyl modified nucleotide
  modified_base 31: mod_base = OTHER; note = 2'-fluoro modified nucleotide with phosphorothioate linkage
  modified_base 32: mod_base = OTHER; note = 2'-O-methyl modified nucleotide with phosphorothioate linkage
  misc_difference 33: note = 2'-fluoro modified nucleotide with phosphorothioate linkage may be attached to trivalent N-Acetylgalactosamine
tcagatcttactctgcgtcagagtaagatctga

SEQ ID NO: 1023 - RNA, 33 nt, synthetic construct
  source 1..33: mol_type = other RNA
  misc_difference 1: note = 2'-O-methyl modified nucleotide with phosphorothioate linkage may be modified with 5'-Phosphate
  modified_base 2: mod_base = OTHER; note = 2'-fluoro modified nucleotide with phosphorothioate linkage
  modified_base 3: mod_base = OTHER; note = 2'-O-methyl modified nucleotide
  modified_base 4: mod_base = OTHER; note = 2'-fluoro modified nucleotide
  modified_base 5: mod_base = OTHER; note = 2'-O-methyl modified nucleotide
  modified_base 6: mod_base = OTHER; note = 2'-fluoro modified nucleotide
  modified_base 7: mod_base = OTHER; note = 2'-O-methyl modified nucleotide
  modified_base 8: mod_base = OTHER; note = 2'-fluoro modified nucleotide
  modified_base 9: mod_base = OTHER; note = 2'-O-methyl modified nucleotide
  modified_base 10: mod_base = OTHER; note = 2'-fluoro modified nucleotide
  modified_base 11: mod_base = OTHER; note = 2'-O-methyl modified nucleotide
  modified_base 12: mod_base = OTHER; note = 2'-fluoro modified nucleotide
  modified_base 13: mod_base = OTHER; note = 2'-O-methyl modified nucleotide
  modified_base 14: mod_base = OTHER; note = 2'-fluoro modified nucleotide with phosphorothioate linkage
  modified_base 15: mod_base = OTHER; note = 2'-O-methyl modified nucleotide with phosphorothioate linkage
  modified_base 16: mod_base = OTHER; note = 2'-fluoro modified nucleotide with phosphorothioate linkage
  modified_base 17: mod_base = OTHER; note = 2'-O-methyl modified nucleotide with phosphorothioate linkage
  modified_base 18: mod_base = OTHER; note = 2'-fluoro modified nucleotide with phosphorothioate linkage
  modified_base 19: mod_base = OTHER; note = 2'-O-methyl modified nucleotide with phosphorothioate linkage
  modified_base 20: mod_base = OTHER; note = 2'-O-methyl modified nucleotide
  modified_base 21: mod_base = OTHER; note = 2'-fluoro modified nucleotide
  modified_base 22: mod_base = OTHER; note = 2'-O-methyl modified nucleotide
  modified_base 23: mod_base = OTHER; note = 2'-fluoro modified nucleotide
  modified_base 24: mod_base = OTHER; note = 2'-O-methyl modified nucleotide
  modified_base 25: mod_base = OTHER; note = 2'-fluoro modified nucleotide
  modified_base 26: mod_base = OTHER; note = 2'-O-methyl modified nucleotide
  modified_base 27: mod_base = OTHER; note = 2'-fluoro modified nucleotide
  modified_base 28: mod_base = OTHER; note = 2'-O-methyl modified nucleotide
  modified_base 29: mod_base = OTHER; note = 2'-fluoro modified nucleotide
  modified_base 30: mod_base = OTHER; note = 2'-O-methyl modified nucleotide
  modified_base 31: mod_base = OTHER; note = 2'-fluoro modified nucleotide with phosphorothioate linkage
  modified_base 32: mod_base = OTHER; note = 2'-O-methyl modified nucleotide with phosphorothioate linkage
  misc_difference 33: note = 2'-fluoro modified nucleotide with phosphorothioate linkage may be attached to trivalent N-Acetylgalactosamine
tgggcttctgcttctccaggaagcagaagccca

SEQ ID NO: 1024 - RNA, 33 nt, synthetic construct
  source 1..33: mol_type = other RNA
  misc_difference 1: note = 2'-O-methyl modified nucleotide with phosphorothioate linkage may be modified with 5'-Phosphate
  modified_base 2: mod_base = OTHER; note = 2'-fluoro modified nucleotide with phosphorothioate linkage
  modified_base 3: mod_base = OTHER; note = 2'-O-methyl modified nucleotide
  modified_base 4: mod_base = OTHER; note = 2'-fluoro modified nucleotide
  modified_base 5: mod_base = OTHER; note = 2'-O-methyl modified nucleotide
  modified_base 6: mod_base = OTHER; note = 2'-fluoro modified nucleotide
  modified_base 7: mod_base = OTHER; note = 2'-O-methyl modified nucleotide
  modified_base 8: mod_base = OTHER; note = 2'-fluoro modified nucleotide
  modified_base 9: mod_base = OTHER; note = 2'-O-methyl modified nucleotide
  modified_base 10: mod_base = OTHER; note = 2'-fluoro modified nucleotide
  modified_base 11: mod_base = OTHER; note = 2'-O-methyl modified nucleotide
  modified_base 12: mod_base = OTHER; note = 2'-fluoro modified nucleotide
  modified_base 13: mod_base = OTHER; note = 2'-O-methyl modified nucleotide
  modified_base 14: mod_base = OTHER; note = 2'-fluoro modified nucleotide with phosphorothioate linkage
  modified_base 15: mod_base = OTHER; note = 2'-O-methyl modified nucleotide with phosphorothioate linkage
  modified_base 16: mod_base = OTHER; note = 2'-fluoro modified nucleotide with phosphorothioate linkage
  modified_base 17: mod_base = OTHER; note = 2'-O-methyl modified nucleotide with phosphorothioate linkage
  modified_base 18: mod_base = OTHER; note = 2'-fluoro modified nucleotide with phosphorothioate linkage
  modified_base 19: mod_base = OTHER; note = 2'-O-methyl modified nucleotide with phosphorothioate linkage
  modified_base 20: mod_base = OTHER; note = 2'-O-methyl modified nucleotide
  modified_base 21: mod_base = OTHER; note = 2'-fluoro modified nucleotide
  modified_base 22: mod_base = OTHER; note = 2'-O-methyl modified nucleotide
  modified_base 23: mod_base = OTHER; note = 2'-fluoro modified nucleotide
  modified_base 24: mod_base = OTHER; note = 2'-O-methyl modified nucleotide
  modified_base 25: mod_base = OTHER; note = 2'-fluoro modified nucleotide
  modified_base 26: mod_base = OTHER; note = 2'-O-methyl modified nucleotide
  modified_base 27: mod_base = OTHER; note = 2'-fluoro modified nucleotide
  modified_base 28: mod_base = OTHER; note = 2'-O-methyl modified nucleotide
  modified_base 29: mod_base = OTHER; note = 2'-fluoro modified nucleotide
  modified_base 30: mod_base = OTHER; note = 2'-O-methyl modified nucleotide
  modified_base 31: mod_base = OTHER; note = 2'-fluoro modified nucleotide with phosphorothioate linkage
  modified_base 32: mod_base = OTHER; note = 2'-O-methyl modified nucleotide with phosphorothioate linkage
  misc_difference 33: note = 2'-fluoro modified nucleotide with phosphorothioate linkage may be attached to trivalent N-Acetylgalactosamine
tctggttttatggtgacctaccataaaaccaga

SEQ ID NO: 1025 - RNA, 33 nt, synthetic construct
  source 1..33: mol_type = other RNA
  misc_difference 1: note = 2'-O-methyl modified nucleotide with phosphorothioate linkage may be modified with 5'-Phosphate
  modified_base 2: mod_base = OTHER; note = 2'-fluoro modified nucleotide with phosphorothioate linkage
  modified_base 3: mod_base = OTHER; note = 2'-O-methyl modified nucleotide
  modified_base 4: mod_base = OTHER; note = 2'-fluoro modified nucleotide
  modified_base 5: mod_base = OTHER; note = 2'-O-methyl modified nucleotide
  modified_base 6: mod_base = OTHER; note = 2'-fluoro modified nucleotide
  modified_base 7: mod_base = OTHER; note = 2'-O-methyl modified nucleotide
  modified_base 8: mod_base = OTHER; note = 2'-fluoro modified nucleotide
  modified_base 9: mod_base = OTHER; note = 2'-O-methyl modified nucleotide
  modified_base 10: mod_base = OTHER; note = 2'-fluoro modified nucleotide
  modified_base 11: mod_base = OTHER; note = 2'-O-methyl modified nucleotide
  modified_base 12: mod_base = OTHER; note = 2'-fluoro modified nucleotide
  modified_base 13: mod_base = OTHER; note = 2'-O-methyl modified nucleotide
  modified_base 14: mod_base = OTHER; note = 2'-fluoro modified nucleotide with phosphorothioate linkage
  modified_base 15: mod_base = OTHER; note = 2'-O-methyl modified nucleotide with phosphorothioate linkage
  modified_base 16: mod_base = OTHER; note = 2'-fluoro modified nucleotide with phosphorothioate linkage
  modified_base 17: mod_base = OTHER; note = 2'-O-methyl modified nucleotide with phosphorothioate linkage
  modified_base 18: mod_base = OTHER; note = 2'-fluoro modified nucleotide with phosphorothioate linkage
  modified_base 19: mod_base = OTHER; note = 2'-O-methyl modified nucleotide with phosphorothioate linkage
  modified_base 20: mod_base = OTHER; note = 2'-O-methyl modified nucleotide
  modified_base 21: mod_base = OTHER; note = 2'-fluoro modified nucleotide
  modified_base 22: mod_base = OTHER; note = 2'-O-methyl modified nucleotide
  modified_base 23: mod_base = OTHER; note = 2'-fluoro modified nucleotide
  modified_base 24: mod_base = OTHER; note = 2'-O-methyl modified nucleotide
  modified_base 25: mod_base = OTHER; note = 2'-fluoro modified nucleotide
  modified_base 26: mod_base = OTHER; note = 2'-O-methyl modified nucleotide
  modified_base 27: mod_base = OTHER; note = 2'-fluoro modified nucleotide
  modified_base 28: mod_base = OTHER; note = 2'-O-methyl modified nucleotide
  modified_base 29: mod_base = OTHER; note = 2'-fluoro modified nucleotide
  modified_base 30: mod_base = OTHER; note = 2'-O-methyl modified nucleotide
  modified_base 31: mod_base = OTHER; note = 2'-fluoro modified nucleotide with phosphorothioate linkage
  modified_base 32: mod_base = OTHER; note = 2'-O-methyl modified nucleotide with phosphorothioate linkage
  misc_difference 33: note = 2'-fluoro modified nucleotide with phosphorothioate linkage may be attached to trivalent N-Acetylgalactosamine
tggcacccaaagacaaccagtctttgggtgcca

SEQ ID NO: 1026 - RNA, 33 nt, synthetic construct
  source 1..33: mol_type = other RNA
  misc_difference 1: note = 2'-O-methyl modified nucleotide with phosphorothioate linkage may be modified with 5'-Phosphate
  modified_base 2: mod_base = OTHER; note = 2'-fluoro modified nucleotide with phosphorothioate linkage
  modified_base 3: mod_base = OTHER; note = 2'-O-methyl modified nucleotide
  modified_base 4: mod_base = OTHER; note = 2'-fluoro modified nucleotide
  modified_base 5: mod_base = OTHER; note = 2'-O-methyl modified nucleotide
  modified_base 6: mod_base = OTHER; note = 2'-fluoro modified nucleotide
  modified_base 7: mod_base = OTHER; note = 2'-O-methyl modified nucleotide
  modified_base 8: mod_base = OTHER; note = 2'-fluoro modified nucleotide
  modified_base 9: mod_base = OTHER; note = 2'-O-methyl modified nucleotide
  modified_base 10: mod_base = OTHER; note = 2'-fluoro modified nucleotide
  modified_base 11: mod_base = OTHER; note = 2'-O-methyl modified nucleotide
  modified_base 12: mod_base = OTHER; note = 2'-fluoro modified nucleotide
  modified_base 13: mod_base = OTHER; note = 2'-O-methyl modified nucleotide
  modified_base 14: mod_base = OTHER; note = 2'-fluoro modified nucleotide with phosphorothioate linkage
  modified_base 15: mod_base = OTHER; note = 2'-O-methyl modified nucleotide with phosphorothioate linkage
  modified_base 16: mod_base = OTHER; note = 2'-fluoro modified nucleotide with phosphorothioate linkage
  modified_base 17: mod_base = OTHER; note = 2'-O-methyl modified nucleotide with phosphorothioate linkage
  modified_base 18: mod_base = OTHER; note = 2'-fluoro modified nucleotide with phosphorothioate linkage
  modified_base 19: mod_base = OTHER; note = 2'-O-methyl modified nucleotide with phosphorothioate linkage
  modified_base 20: mod_base = OTHER; note = 2'-O-methyl modified nucleotide
  modified_base 21: mod_base = OTHER; note = 2'-fluoro modified nucleotide
  modified_base 22: mod_base = OTHER; note = 2'-O-methyl modified nucleotide
  modified_base 23: mod_base = OTHER; note = 2'-fluoro modified nucleotide
  modified_base 24: mod_base = OTHER; note = 2'-O-methyl modified nucleotide
  modified_base 25: mod_base = OTHER; note = 2'-fluoro modified nucleotide
  modified_base 26: mod_base = OTHER; note = 2'-O-methyl modified nucleotide
  modified_base 27: mod_base = OTHER; note = 2'-fluoro modified nucleotide
  modified_base 28: mod_base = OTHER; note = 2'-O-methyl modified nucleotide
  modified_base 29: mod_base = OTHER; note = 2'-fluoro modified nucleotide
  modified_base 30: mod_base = OTHER; note = 2'-O-methyl modified nucleotide
  modified_base 31: mod_base = OTHER; note = 2'-fluoro modified nucleotide with phosphorothioate linkage
  modified_base 32: mod_base = OTHER; note = 2'-O-methyl modified nucleotide with phosphorothioate linkage
  misc_difference 33: note = 2'-fluoro modified nucleotide with phosphorothioate linkage may be attached to trivalent N-Acetylgalactosamine
tagctcttggttctgccggagaaccaagagcta

SEQ ID NO: 1027 - RNA, 33 nt, synthetic construct
  source 1..33: mol_type = other RNA
  misc_difference 1: note = 2'-O-methyl modified nucleotide with phosphorothioate linkage may be modified with 5'-Phosphate
  modified_base 2: mod_base = OTHER; note = 2'-fluoro modified nucleotide with phosphorothioate linkage
  modified_base 3: mod_base = OTHER; note = 2'-O-methyl modified nucleotide
  modified_base 4: mod_base = OTHER; note = 2'-fluoro modified nucleotide
  modified_base 5: mod_base = OTHER; note = 2'-O-methyl modified nucleotide
  modified_base 6: mod_base = OTHER; note = 2'-fluoro modified nucleotide
  modified_base 7: mod_base = OTHER; note = 2'-O-methyl modified nucleotide
  modified_base 8: mod_base = OTHER; note = 2'-fluoro modified nucleotide
  modified_base 9: mod_base = OTHER; note = 2'-O-methyl modified nucleotide
  modified_base 10: mod_base = OTHER; note = 2'-fluoro modified nucleotide
  modified_base 11: mod_base = OTHER; note = 2'-O-methyl modified nucleotide
  modified_base 12: mod_base = OTHER; note = 2'-fluoro modified nucleotide
  modified_base 13: mod_base = OTHER; note = 2'-O-methyl modified nucleotide
  modified_base 14: mod_base = OTHER; note = 2'-fluoro modified nucleotide with phosphorothioate linkage
  modified_base 15: mod_base = OTHER; note = 2'-O-methyl modified nucleotide with phosphorothioate linkage
  modified_base 16: mod_base = OTHER; note = 2'-fluoro modified nucleotide with phosphorothioate linkage
  modified_base 17: mod_base = OTHER; note = 2'-O-methyl modified nucleotide with phosphorothioate linkage
  modified_base 18: mod_base = OTHER; note = 2'-fluoro modified nucleotide with phosphorothioate linkage
  modified_base 19: mod_base = OTHER; note = 2'-O-methyl modified nucleotide with phosphorothioate linkage
  modified_base 20: mod_base = OTHER; note = 2'-O-methyl modified nucleotide
  modified_base 21: mod_base = OTHER; note = 2'-fluoro modified nucleotide
  modified_base 22: mod_base = OTHER; note = 2'-O-methyl modified nucleotide
  modified_base 23: mod_base = OTHER; note = 2'-fluoro modified nucleotide
  modified_base 24: mod_base = OTHER; note = 2'-O-methyl modified nucleotide
  modified_base 25: mod_base = OTHER; note = 2'-fluoro modified nucleotide
  modified_base 26: mod_base = OTHER; note = 2'-O-methyl modified nucleotide
  modified_base 27: mod_base = OTHER; note = 2'-fluoro modified nucleotide
  modified_base 28: mod_base = OTHER; note = 2'-O-methyl modified nucleotide
  modified_base 29: mod_base = OTHER; note = 2'-fluoro modified nucleotide
  modified_base 30: mod_base = OTHER; note = 2'-O-methyl modified nucleotide
  modified_base 31: mod_base = OTHER; note = 2'-fluoro modified nucleotide with phosphorothioate linkage
  modified_base 32: mod_base = OTHER; note = 2'-O-methyl modified nucleotide with phosphorothioate linkage
  misc_difference 33: note = 2'-fluoro modified nucleotide with phosphorothioate linkage may be attached to trivalent N-Acetylgalactosamine
tggaagttgacgttgagggaacgtcaacttcca

SEQ ID NO: 1028 - RNA, 33 nt, synthetic construct
  source 1..33: mol_type = other RNA
  misc_difference 1: note = 2'-O-methyl modified nucleotide with phosphorothioate linkage may be modified with 5'-Phosphate
  modified_base 2: mod_base = OTHER; note = 2'-fluoro modified nucleotide with phosphorothioate linkage
  modified_base 3: mod_base = OTHER; note = 2'-O-methyl modified nucleotide
  modified_base 4: mod_base = OTHER; note = 2'-fluoro modified nucleotide
  modified_base 5: mod_base = OTHER; note = 2'-O-methyl modified nucleotide
  modified_base 6: mod_base = OTHER; note = 2'-fluoro modified nucleotide
  modified_base 7: mod_base = OTHER; note = 2'-O-methyl modified nucleotide
  modified_base 8: mod_base = OTHER; note = 2'-fluoro modified nucleotide
  modified_base 9: mod_base = OTHER; note = 2'-O-methyl modified nucleotide
  modified_base 10: mod_base = OTHER; note = 2'-fluoro modified nucleotide
  modified_base 11: mod_base = OTHER; note = 2'-O-methyl modified nucleotide
  modified_base 12: mod_base = OTHER; note = 2'-fluoro modified nucleotide
  modified_base 13: mod_base = OTHER; note = 2'-O-methyl modified nucleotide
  modified_base 14: mod_base = OTHER; note = 2'-fluoro modified nucleotide with phosphorothioate linkage
  modified_base 15: mod_base = OTHER; note = 2'-O-methyl modified nucleotide with phosphorothioate linkage
  modified_base 16: mod_base = OTHER; note = 2'-fluoro modified nucleotide with phosphorothioate linkage
  modified_base 17: mod_base = OTHER; note = 2'-O-methyl modified nucleotide with phosphorothioate linkage
  modified_base 18: mod_base = OTHER; note = 2'-fluoro modified nucleotide with phosphorothioate linkage
  modified_base 19: mod_base = OTHER; note = 2'-O-methyl modified nucleotide with phosphorothioate linkage
  modified_base 20: mod_base = OTHER; note = 2'-O-methyl modified nucleotide
  modified_base 21: mod_base = OTHER; note = 2'-fluoro modified nucleotide
  modified_base 22: mod_base = OTHER; note = 2'-O-methyl modified nucleotide
  modified_base 23: mod_base = OTHER; note = 2'-fluoro modified nucleotide
  modified_base 24: mod_base = OTHER; note = 2'-O-methyl modified nucleotide
  modified_base 25: mod_base = OTHER; note = 2'-fluoro modified nucleotide
  modified_base 26: mod_base = OTHER; note = 2'-O-methyl modified nucleotide
  modified_base 27: mod_base = OTHER; note = 2'-fluoro modified nucleotide
  modified_base 28: mod_base = OTHER; note = 2'-O-methyl modified nucleotide
  modified_base 29: mod_base = OTHER; note = 2'-fluoro modified nucleotide
  modified_base 30: mod_base = OTHER; note = 2'-O-methyl modified nucleotide
  modified_base 31: mod_base = OTHER; note = 2'-fluoro modified nucleotide with phosphorothioate linkage
  modified_base 32: mod_base = OTHER; note = 2'-O-methyl modified nucleotide with phosphorothioate linkage
  misc_difference 33: note = 2'-fluoro modified nucleotide with phosphorothioate linkage may be attached to trivalent N-Acetylgalactosamine
tgcagagctgggttgtctgaacccagctctgca

SEQ ID NO: 1029 - RNA, 33 nt, synthetic construct
  source 1..33: mol_type = other RNA
  misc_difference 1: note = 2'-O-methyl modified nucleotide with phosphorothioate linkage may be modified with 5'-Phosphate
  modified_base 2: mod_base = OTHER; note = 2'-fluoro modified nucleotide with phosphorothioate linkage
  modified_base 3: mod_base = OTHER; note = 2'-O-methyl modified nucleotide
  modified_base 4: mod_base = OTHER; note = 2'-fluoro modified nucleotide
  modified_base 5: mod_base = OTHER; note = 2'-O-methyl modified nucleotide
  modified_base 6: mod_base = OTHER; note = 2'-fluoro modified nucleotide
  modified_base 7: mod_base = OTHER; note = 2'-O-methyl modified nucleotide
  modified_base 8: mod_base = OTHER; note = 2'-fluoro modified nucleotide
  modified_base 9: mod_base = OTHER; note = 2'-O-methyl modified nucleotide
  modified_base 10: mod_base = OTHER; note = 2'-fluoro modified nucleotide
  modified_base 11: mod_base = OTHER; note = 2'-O-methyl modified nucleotide
  modified_base 12: mod_base = OTHER; note = 2'-fluoro modified nucleotide
  modified_base 13: mod_base = OTHER; note = 2'-O-methyl modified nucleotide
  modified_base 14: mod_base = OTHER; note = 2'-fluoro modified nucleotide with phosphorothioate linkage
  modified_base 15: mod_base = OTHER; note = 2'-O-methyl modified nucleotide with phosphorothioate linkage
  modified_base 16: mod_base = OTHER; note = 2'-fluoro modified nucleotide with phosphorothioate linkage
  modified_base 17: mod_base = OTHER; note = 2'-O-methyl modified nucleotide with phosphorothioate linkage
  modified_base 18: mod_base = OTHER; note = 2'-fluoro modified nucleotide with phosphorothioate linkage
  modified_base 19: mod_base = OTHER; note = 2'-O-methyl modified nucleotide with phosphorothioate linkage
  modified_base 20: mod_base = OTHER; note = 2'-O-methyl modified nucleotide
  modified_base 21: mod_base = OTHER; note = 2'-fluoro modified nucleotide
  modified_base 22: mod_base = OTHER; note = 2'-O-methyl modified nucleotide
  modified_base 23: mod_base = OTHER; note = 2'-fluoro modified nucleotide
  modified_base 24: mod_base = OTHER; note = 2'-O-methyl modified nucleotide
  modified_base 25: mod_base = OTHER; note = 2'-fluoro modified nucleotide
  modified_base 26: mod_base = OTHER; note = 2'-O-methyl modified nucleotide
  modified_base 27: mod_base = OTHER; note = 2'-fluoro modified nucleotide
  modified_base 28: mod_base = OTHER; note = 2'-O-methyl modified nucleotide
  modified_base 29: mod_base = OTHER; note = 2'-fluoro modified nucleotide
  modified_base 30: mod_base = OTHER; note = 2'-O-methyl modified nucleotide
  modified_base 31: mod_base = OTHER; note = 2'-fluoro modified nucleotide with phosphorothioate linkage
  modified_base 32: mod_base = OTHER; note = 2'-O-methyl modified nucleotide with phosphorothioate linkage
  misc_difference 33: note = 2'-fluoro modified nucleotide with phosphorothioate linkage may be attached to trivalent N-Acetylgalactosamine
tatagtccactcctggctcaggagtggactata

SEQ ID NO: 1030 - RNA, 33 nt, synthetic construct
  source 1..33: mol_type = other RNA
  misc_difference 1: note = 2'-O-methyl modified nucleotide with phosphorothioate linkage may be modified with 5'-Phosphate
  modified_base 2: mod_base = OTHER; note = 2'-fluoro modified nucleotide with phosphorothioate linkage
  modified_base 3: mod_base = OTHER; note = 2'-O-methyl modified nucleotide
  modified_base 4: mod_base = OTHER; note = 2'-fluoro modified nucleotide
  modified_base 5: mod_base = OTHER; note = 2'-O-methyl modified nucleotide
  modified_base 6: mod_base = OTHER; note = 2'-fluoro modified nucleotide
  modified_base 7: mod_base = OTHER; note = 2'-O-methyl modified nucleotide
  modified_base 8: mod_base = OTHER; note = 2'-fluoro modified nucleotide
  modified_base 9: mod_base = OTHER; note = 2'-O-methyl modified nucleotide
  modified_base 10: mod_base = OTHER; note = 2'-fluoro modified nucleotide
  modified_base 11: mod_base = OTHER; note = 2'-O-methyl modified nucleotide
  modified_base 12: mod_base = OTHER; note = 2'-fluoro modified nucleotide
  modified_base 13: mod_base = OTHER; note = 2'-O-methyl modified nucleotide
  modified_base 14: mod_base = OTHER; note = 2'-fluoro modified nucleotide with phosphorothioate linkage
  modified_base 15: mod_base = OTHER; note = 2'-O-methyl modified nucleotide with phosphorothioate linkage
  modified_base 16: mod_base = OTHER; note = 2'-fluoro modified nucleotide with phosphorothioate linkage
  modified_base 17: mod_base = OTHER; note = 2'-O-methyl modified nucleotide with phosphorothioate linkage
  modified_base 18: mod_base = OTHER; note = 2'-fluoro modified nucleotide with phosphorothioate linkage
  modified_base 19: mod_base = OTHER; note = 2'-O-methyl modified nucleotide with phosphorothioate linkage
  modified_base 20: mod_base = OTHER; note = 2'-O-methyl modified nucleotide
  modified_base 21: mod_base = OTHER; note = 2'-fluoro modified nucleotide
  modified_base 22: mod_base = OTHER; note = 2'-O-methyl modified nucleotide
  modified_base 23: mod_base = OTHER; note = 2'-fluoro modified nucleotide
  modified_base 24: mod_base = OTHER; note = 2'-O-methyl modified nucleotide
  modified_base 25: mod_base = OTHER; note = 2'-fluoro modified nucleotide
  modified_base 26: mod_base = OTHER; note = 2'-O-methyl modified nucleotide
  modified_base 27: mod_base = OTHER; note = 2'-fluoro modified nucleotide
  modified_base 28: mod_base = OTHER; note = 2'-O-methyl modified nucleotide
  modified_base 29: mod_base = OTHER; note = 2'-fluoro modified nucleotide
  modified_base 30: mod_base = OTHER; note = 2'-O-methyl modified nucleotide
  modified_base 31: mod_base = OTHER; note = 2'-fluoro modified nucleotide with phosphorothioate linkage
  modified_base 32: mod_base = OTHER; note = 2'-O-methyl modified nucleotide with phosphorothioate linkage
  misc_difference 33: note = 2'-fluoro modified nucleotide with phosphorothioate linkage may be attached to trivalent N-Acetylgalactosamine
ttcgaatttattacaggtggtaataaattcgaa

SEQ ID NO: 1031 - RNA, 33 nt, synthetic construct; identical to SEQ ID NO: 581
  source 1..33: mol_type = other RNA
  misc_difference 1: note = 2'-O-methyl modified nucleotide with phosphorothioate linkage may be modified with 5'-Phosphate
  modified_base 2: mod_base = OTHER; note = 2'-fluoro modified nucleotide with phosphorothioate linkage
  modified_base 3: mod_base = OTHER; note = 2'-O-methyl modified nucleotide
  modified_base 4: mod_base = OTHER; note = 2'-fluoro modified nucleotide
  modified_base 5: mod_base = OTHER; note = 2'-O-methyl modified nucleotide
  modified_base 6: mod_base = OTHER; note = 2'-fluoro modified nucleotide
  modified_base 7: mod_base = OTHER; note = 2'-O-methyl modified nucleotide
  modified_base 8: mod_base = OTHER; note = 2'-fluoro modified nucleotide
  modified_base 9: mod_base = OTHER; note = 2'-O-methyl modified nucleotide
  modified_base 10: mod_base = OTHER; note = 2'-fluoro modified nucleotide
  modified_base 11: mod_base = OTHER; note = 2'-O-methyl modified nucleotide
  modified_base 12: mod_base = OTHER; note = 2'-fluoro modified nucleotide
  modified_base 13: mod_base = OTHER; note = 2'-O-methyl modified nucleotide
  modified_base 14: mod_base = OTHER; note = 2'-fluoro modified nucleotide with phosphorothioate linkage
  modified_base 15: mod_base = OTHER; note = 2'-O-methyl modified nucleotide with phosphorothioate linkage
  modified_base 16: mod_base = OTHER; note = 2'-fluoro modified nucleotide with phosphorothioate linkage
  modified_base 17: mod_base = OTHER; note = 2'-O-methyl modified nucleotide with phosphorothioate linkage
  modified_base 18: mod_base = OTHER; note = 2'-fluoro modified nucleotide with phosphorothioate linkage
  modified_base 19: mod_base = OTHER; note = 2'-O-methyl modified nucleotide with phosphorothioate linkage
  modified_base 20: mod_base = OTHER; note = 2'-O-methyl modified nucleotide
  modified_base 21: mod_base = OTHER; note = 2'-fluoro modified nucleotide
  modified_base 22: mod_base = OTHER; note = 2'-O-methyl modified nucleotide
  modified_base 23: mod_base = OTHER; note = 2'-fluoro modified nucleotide
  modified_base 24: mod_base = OTHER; note = 2'-O-methyl modified nucleotide
  modified_base 25: mod_base = OTHER; note = 2'-fluoro modified nucleotide
  modified_base 26: mod_base = OTHER; note = 2'-O-methyl modified nucleotide
  modified_base 27: mod_base = OTHER; note = 2'-fluoro modified nucleotide
  modified_base 28: mod_base = OTHER; note = 2'-O-methyl modified nucleotide
  modified_base 29: mod_base = OTHER; note = 2'-fluoro modified nucleotide
  modified_base 30: mod_base = OTHER; note = 2'-O-methyl modified nucleotide
  modified_base 31: mod_base = OTHER; note = 2'-fluoro modified nucleotide with phosphorothioate linkage
  modified_base 32: mod_base = OTHER; note = 2'-O-methyl modified nucleotide with phosphorothioate linkage
  misc_difference 33: note = 2'-fluoro modified nucleotide with phosphorothioate linkage may be attached to trivalent N-Acetylgalactosamine

SEQ ID NO: 1032 - RNA, 33 nt, synthetic construct; identical to SEQ ID NO: 582
  source 1..33: mol_type = other RNA
  misc_difference 1: note = 2'-O-methyl modified nucleotide with phosphorothioate linkage may be modified with 5'-Phosphate
  modified_base 2: mod_base = OTHER; note = 2'-fluoro modified nucleotide with phosphorothioate linkage
  modified_base 3: mod_base = OTHER; note = 2'-O-methyl modified nucleotide
  modified_base 4: mod_base = OTHER; note = 2'-fluoro modified nucleotide
  modified_base 5: mod_base = OTHER; note = 2'-O-methyl modified nucleotide
  modified_base 6: mod_base = OTHER; note = 2'-fluoro modified nucleotide
  modified_base 7: mod_base = OTHER; note = 2'-O-methyl modified nucleotide
  modified_base 8: mod_base = OTHER; note = 2'-fluoro modified nucleotide
  modified_base 9: mod_base = OTHER; note = 2'-O-methyl modified nucleotide
  modified_base 10: mod_base = OTHER; note = 2'-fluoro modified nucleotide
  modified_base 11: mod_base = OTHER; note = 2'-O-methyl modified nucleotide
  modified_base 12: mod_base = OTHER; note = 2'-fluoro modified nucleotide
  modified_base 13: mod_base = OTHER; note = 2'-O-methyl modified nucleotide
  modified_base 14: mod_base = OTHER; note = 2'-fluoro modified nucleotide with phosphorothioate linkage
  modified_base 15: mod_base = OTHER; note = 2'-O-methyl modified nucleotide with phosphorothioate linkage
  modified_base 16: mod_base = OTHER; note = 2'-fluoro modified nucleotide with phosphorothioate linkage
  modified_base 17: mod_base = OTHER; note = 2'-O-methyl modified nucleotide with phosphorothioate linkage
  modified_base 18: mod_base = OTHER; note = 2'-fluoro modified nucleotide with phosphorothioate linkage
  modified_base 19: mod_base = OTHER; note = 2'-O-methyl modified nucleotide with phosphorothioate linkage
  modified_base 20: mod_base = OTHER; note = 2'-O-methyl modified nucleotide
  modified_base 21: mod_base = OTHER; note = 2'-fluoro modified nucleotide
  modified_base 22: mod_base = OTHER; note = 2'-O-methyl modified nucleotide
  modified_base 23: mod_base = OTHER; note = 2'-fluoro modified nucleotide
  modified_base 24: mod_base = OTHER; note = 2'-O-methyl modified nucleotide
  modified_base 25: mod_base = OTHER; note = 2'-fluoro modified nucleotide
  modified_base 26: mod_base = OTHER; note = 2'-O-methyl modified nucleotide
  modified_base 27: mod_base = OTHER; note = 2'-fluoro modified nucleotide
  modified_base 28: mod_base = OTHER; note = 2'-O-methyl modified nucleotide
  modified_base 29: mod_base = OTHER; note = 2'-fluoro modified nucleotide
  modified_base 30: mod_base = OTHER; note = 2'-O-methyl modified nucleotide
  modified_base 31: mod_base = OTHER; note = 2'-fluoro modified nucleotide with phosphorothioate linkage
  modified_base 32: mod_base = OTHER; note = 2'-O-methyl modified nucleotide with phosphorothioate linkage
  misc_difference 33: note = 2'-fluoro modified nucleotide with phosphorothioate linkage may be attached to trivalent N-Acetylgalactosamine

SEQ ID NO: 1033 - RNA, 33 nt, synthetic construct
  source 1..33: mol_type = other RNA
  misc_difference 1: note = 2'-O-methyl modified nucleotide with phosphorothioate linkage may be modified with 5'-Phosphate
  modified_base 2: mod_base = OTHER; note = 2'-fluoro modified nucleotide with phosphorothioate linkage
  modified_base 3: mod_base = OTHER; note = 2'-O-methyl modified nucleotide
  modified_base 4: mod_base = OTHER; note = 2'-fluoro modified nucleotide
  modified_base 5: mod_base = OTHER; note = 2'-O-methyl modified nucleotide
  modified_base 6: mod_base = OTHER; note = 2'-fluoro modified nucleotide
  modified_base 7: mod_base = OTHER; note = 2'-O-methyl modified nucleotide
  modified_base 8: mod_base = OTHER; note = 2'-fluoro modified nucleotide
  modified_base 9: mod_base = OTHER; note = 2'-O-methyl modified nucleotide
  modified_base 10: mod_base = OTHER; note = 2'-fluoro modified nucleotide
  modified_base 11: mod_base = OTHER; note = 2'-O-methyl modified nucleotide
  modified_base 12: mod_base = OTHER; note = 2'-fluoro modified nucleotide
  modified_base 13: mod_base = OTHER; note = 2'-O-methyl modified nucleotide
  modified_base 14: mod_base = OTHER; note = 2'-fluoro modified nucleotide with phosphorothioate linkage
  modified_base 15: mod_base = OTHER; note = 2'-O-methyl modified nucleotide with phosphorothioate linkage
  modified_base 16: mod_base = OTHER; note = 2'-fluoro modified nucleotide with phosphorothioate linkage
  modified_base 17: mod_base = OTHER; note = 2'-O-methyl modified nucleotide with phosphorothioate linkage
  modified_base 18: mod_base = OTHER; note = 2'-fluoro modified nucleotide with phosphorothioate linkage
  modified_base 19: mod_base = OTHER; note = 2'-O-methyl modified nucleotide with phosphorothioate linkage
  modified_base 20: mod_base = OTHER; note = 2'-O-methyl modified nucleotide
  modified_base 21: mod_base = OTHER; note = 2'-fluoro modified nucleotide
  modified_base 22: mod_base = OTHER; note = 2'-O-methyl modified nucleotide
  modified_base 23: mod_base = OTHER; note = 2'-fluoro modified nucleotide
  modified_base 24: mod_base = OTHER; note = 2'-O-methyl modified nucleotide
  modified_base 25: mod_base = OTHER; note = 2'-fluoro modified nucleotide
  modified_base 26: mod_base = OTHER; note = 2'-O-methyl modified nucleotide
  modified_base 27: mod_base = OTHER; note = 2'-fluoro modified nucleotide
  modified_base 28: mod_base = OTHER; note = 2'-O-methyl modified nucleotide
  modified_base 29: mod_base = OTHER; note = 2'-fluoro modified nucleotide
  modified_base 30: mod_base = OTHER; note = 2'-O-methyl modified nucleotide
  modified_base 31: mod_base = OTHER; note = 2'-fluoro modified nucleotide with phosphorothioate linkage
  modified_base 32: mod_base = OTHER; note = 2'-O-methyl modified nucleotide with phosphorothioate linkage
  misc_difference 33: note = 2'-fluoro modified nucleotide with phosphorothioate linkage may be attached to trivalent N-Acetylgalactosamine
tgaaacgatgttctcttctagaacatcgtttca

SEQ ID NO: 1034 - RNA, 33 nt, synthetic construct; identical to SEQ ID NO: 584
  source 1..33: mol_type = other RNA
  misc_difference 1: note = 2'-O-methyl modified nucleotide with phosphorothioate linkage may be modified with 5'-Phosphate
  modified_base 2: mod_base = OTHER; note = 2'-fluoro modified nucleotide with phosphorothioate linkage
  modified_base 3: mod_base = OTHER; note = 2'-O-methyl modified nucleotide
  modified_base 4: mod_base = OTHER; note = 2'-fluoro modified nucleotide
  modified_base 5: mod_base = OTHER; note = 2'-O-methyl modified nucleotide
  modified_base 6: mod_base = OTHER; note = 2'-fluoro modified nucleotide
  modified_base 7: mod_base = OTHER; note = 2'-O-methyl modified nucleotide
  modified_base 8: mod_base = OTHER; note = 2'-fluoro modified nucleotide
  modified_base 9: mod_base = OTHER; note = 2'-O-methyl modified nucleotide
  modified_base 10: mod_base = OTHER; note = 2'-fluoro modified nucleotide
  modified_base 11: mod_base = OTHER; note = 2'-O-methyl modified nucleotide
  modified_base 12: mod_base = OTHER; note = 2'-fluoro modified nucleotide
  modified_base 13: mod_base = OTHER; note = 2'-O-methyl modified nucleotide
  modified_base 14: mod_base = OTHER; note = 2'-fluoro modified nucleotide with phosphorothioate linkage
  modified_base 15: mod_base = OTHER; note = 2'-O-methyl modified nucleotide with phosphorothioate linkage
  modified_base 16: mod_base = OTHER; note = 2'-fluoro modified nucleotide with phosphorothioate linkage
  modified_base 17: mod_base = OTHER; note = 2'-O-methyl modified nucleotide with phosphorothioate linkage
  modified_base 18: mod_base = OTHER; note = 2'-fluoro modified nucleotide with phosphorothioate linkage
  modified_base 19: mod_base = OTHER; note = 2'-O-methyl modified nucleotide with phosphorothioate linkage
  modified_base 20: mod_base = OTHER; note = 2'-O-methyl modified nucleotide
  modified_base 21: mod_base = OTHER; note = 2'-fluoro modified nucleotide
  modified_base 22: mod_base = OTHER; note = 2'-O-methyl modified nucleotide
  modified_base 23: mod_base = OTHER; note = 2'-fluoro modified nucleotide
  modified_base 24: mod_base = OTHER; note = 2'-O-methyl modified nucleotide
  modified_base 25: mod_base = OTHER; note = 2'-fluoro modified nucleotide
  modified_base 26: mod_base = OTHER; note = 2'-O-methyl modified nucleotide
  modified_base 27: mod_base = OTHER; note = 2'-fluoro modified nucleotide
  modified_base 28: mod_base = OTHER; note = 2'-O-methyl modified nucleotide
  modified_base 29: mod_base = OTHER; note = 2'-fluoro modified nucleotide
  modified_base 30: mod_base = OTHER; note = 2'-O-methyl modified nucleotide
  modified_base 31: mod_base = OTHER; note = 2'-fluoro modified nucleotide with phosphorothioate linkage
  modified_base 32: mod_base = OTHER; note = 2'-O-methyl modified nucleotide with phosphorothioate linkage
  misc_difference 33: note = 2'-fluoro modified nucleotide with phosphorothioate linkage may be attached to trivalent N-Acetylgalactosamine

SEQ ID NO: 1035 - RNA, 33 nt, synthetic construct; identical to SEQ ID NO: 585
  source 1..33: mol_type = other RNA
  misc_difference 1: note = 2'-O-methyl modified nucleotide with phosphorothioate linkage may be modified with 5'-Phosphate
  modified_base 2: mod_base = OTHER; note = 2'-fluoro modified nucleotide with phosphorothioate linkage
  modified_base 3: mod_base = OTHER; note = 2'-O-methyl modified nucleotide
  modified_base 4: mod_base = OTHER; note = 2'-fluoro modified nucleotide
  modified_base 5: mod_base = OTHER; note = 2'-O-methyl modified nucleotide
  modified_base 6: mod_base = OTHER; note = 2'-fluoro modified nucleotide
  modified_base 7: mod_base = OTHER; note = 2'-O-methyl modified nucleotide
  modified_base 8: mod_base = OTHER; note = 2'-fluoro modified nucleotide
  modified_base 9: mod_base = OTHER; note = 2'-O-methyl modified nucleotide
  modified_base 10: mod_base = OTHER; note = 2'-fluoro modified nucleotide
  modified_base 11: mod_base = OTHER; note = 2'-O-methyl modified nucleotide
  modified_base 12: mod_base = OTHER; note = 2'-fluoro modified nucleotide
  modified_base 13: mod_base = OTHER; note = 2'-O-methyl modified nucleotide
  modified_base 14: mod_base = OTHER; note = 2'-fluoro modified nucleotide with phosphorothioate linkage
  modified_base 15: mod_base = OTHER; note = 2'-O-methyl modified nucleotide with phosphorothioate linkage
  modified_base 16: mod_base = OTHER; note = 2'-fluoro modified nucleotide with phosphorothioate linkage
  modified_base 17: mod_base = OTHER; note = 2'-O-methyl modified nucleotide with phosphorothioate linkage
  modified_base 18: mod_base = OTHER; note = 2'-fluoro modified nucleotide with phosphorothioate linkage
  modified_base 19: mod_base = OTHER; note = 2'-O-methyl modified nucleotide with phosphorothioate linkage
  modified_base 20: mod_base = OTHER; note = 2'-O-methyl modified nucleotide
  modified_base 21: mod_base = OTHER; note = 2'-fluoro modified nucleotide
  modified_base 22: mod_base = OTHER; note = 2'-O-methyl modified nucleotide
  modified_base 23: mod_base = OTHER; note = 2'-fluoro modified nucleotide
  modified_base 24: mod_base = OTHER; note = 2'-O-methyl modified nucleotide
  modified_base 25: mod_base = OTHER; note = 2'-fluoro modified nucleotide
  modified_base 26: mod_base = OTHER; note = 2'-O-methyl modified nucleotide
  modified_base 27: mod_base = OTHER; note = 2'-fluoro modified nucleotide
  modified_base 28: mod_base = OTHER; note = 2'-O-methyl modified nucleotide
  modified_base 29: mod_base = OTHER; note = 2'-fluoro modified nucleotide
  modified_base 30: mod_base = OTHER; note = 2'-O-methyl modified nucleotide
  modified_base 31: mod_base = OTHER; note = 2'-fluoro modified nucleotide with phosphorothioate linkage
  modified_base 32: mod_base = OTHER; note = 2'-O-methyl modified nucleotide with phosphorothioate linkage
  misc_difference 33: note = 2'-fluoro modified nucleotide with phosphorothioate linkage may be attached to trivalent N-Acetylgalactosamine

SEQ ID NO: 1036 - RNA, 33 nt, synthetic construct
  source 1..33: mol_type = other RNA
  misc_difference 1: note = 2'-O-methyl modified nucleotide with phosphorothioate linkage may be modified with 5'-Phosphate
  modified_base 2: mod_base = OTHER; note = 2'-fluoro modified nucleotide with phosphorothioate linkage
  modified_base 3: mod_base = OTHER; note = 2'-O-methyl modified nucleotide
  modified_base 4: mod_base = OTHER; note = 2'-fluoro modified nucleotide
  modified_base 5: mod_base = OTHER; note = 2'-O-methyl modified nucleotide
  modified_base 6: mod_base = OTHER; note = 2'-fluoro modified nucleotide
  modified_base 7: mod_base = OTHER; note = 2'-O-methyl modified nucleotide
  modified_base 8: mod_base = OTHER; note = 2'-fluoro modified nucleotide
  modified_base 9: mod_base = OTHER; note = 2'-O-methyl modified nucleotide
  modified_base 10: mod_base = OTHER; note = 2'-fluoro modified nucleotide
  modified_base 11: mod_base = OTHER; note = 2'-O-methyl modified nucleotide
  modified_base 12: mod_base = OTHER; note = 2'-fluoro modified nucleotide
  modified_base 13: mod_base = OTHER; note = 2'-O-methyl modified nucleotide
  modified_base 14: mod_base = OTHER; note = 2'-fluoro modified nucleotide with phosphorothioate linkage
  modified_base 15: mod_base = OTHER; note = 2'-O-methyl modified nucleotide with phosphorothioate linkage
  modified_base 16: mod_base = OTHER; note = 2'-fluoro modified nucleotide with phosphorothioate linkage
  modified_base 17: mod_base = OTHER; note = 2'-O-methyl modified nucleotide with phosphorothioate linkage
  modified_base 18: mod_base = OTHER; note = 2'-fluoro modified nucleotide with phosphorothioate linkage
  modified_base 19: mod_base = OTHER; note = 2'-O-methyl modified nucleotide with phosphorothioate linkage
  modified_base 20: mod_base = OTHER; note = 2'-O-methyl modified nucleotide
  modified_base 21: mod_base = OTHER; note = 2'-fluoro modified nucleotide
  modified_base 22: mod_base = OTHER; note = 2'-O-methyl modified nucleotide
  modified_base 23: mod_base = OTHER; note = 2'-fluoro modified nucleotide
  modified_base 24: mod_base = OTHER; note = 2'-O-methyl modified nucleotide
  modified_base 25: mod_base = OTHER; note = 2'-fluoro modified nucleotide
  modified_base 26: mod_base = OTHER; note = 2'-O-methyl modified nucleotide
  modified_base 27: mod_base = OTHER; note = 2'-fluoro modified nucleotide
  modified_base 28: mod_base = OTHER; note = 2'-O-methyl modified nucleotide
  modified_base 29: mod_base = OTHER; note = 2'-fluoro modified nucleotide
  modified_base 30: mod_base = OTHER; note = 2'-O-methyl modified nucleotide
  modified_base 31: mod_base = OTHER; note = 2'-fluoro modified nucleotide with phosphorothioate linkage
  modified_base 32: mod_base = OTHER; note = 2'-O-methyl modified nucleotide with phosphorothioate linkage
  misc_difference 33: note = 2'-fluoro modified nucleotide with phosphorothioate linkage may be attached to trivalent N-Acetylgalactosamine
ttgcgcaccgtgatgctcaatcacggtgcgcaa

SEQ ID NO: 1037 - RNA, 33 nt, synthetic construct
  source 1..33: mol_type = other RNA
  misc_difference 1: note = 2'-O-methyl modified nucleotide with phosphorothioate linkage may be modified with 5'-Phosphate
  modified_base 2: mod_base = OTHER; note = 2'-fluoro modified nucleotide with phosphorothioate linkage
  modified_base 3: mod_base = OTHER; note = 2'-O-methyl modified nucleotide
  modified_base 4: mod_base = OTHER; note = 2'-fluoro modified nucleotide
  modified_base 5: mod_base = OTHER; note = 2'-O-methyl modified nucleotide
  modified_base 6: mod_base = OTHER; note = 2'-fluoro modified nucleotide
  modified_base 7: mod_base = OTHER; note = 2'-O-methyl modified nucleotide
  modified_base 8: mod_base = OTHER; note = 2'-fluoro modified nucleotide
  modified_base 9: mod_base = OTHER; note = 2'-O-methyl modified nucleotide
  modified_base 10: mod_base = OTHER; note = 2'-fluoro modified nucleotide
  modified_base 11: mod_base = OTHER; note = 2'-O-methyl modified nucleotide
  modified_base 12: mod_base = OTHER; note = 2'-fluoro modified nucleotide
  modified_base 13: mod_base = OTHER; note = 2'-O-methyl modified nucleotide
  modified_base 14: mod_base = OTHER; note = 2'-fluoro modified nucleotide with phosphorothioate linkage
  modified_base 15: mod_base = OTHER; note = 2'-O-methyl modified nucleotide with phosphorothioate linkage
  modified_base 16: mod_base = OTHER; note = 2'-fluoro modified nucleotide with phosphorothioate linkage
  modified_base 17: mod_base = OTHER; note = 2'-O-methyl modified nucleotide with phosphorothioate linkage
  modified_base 18: mod_base = OTHER; note = 2'-fluoro modified nucleotide with phosphorothioate linkage
  modified_base 19: mod_base = OTHER; note = 2'-O-methyl modified nucleotide with phosphorothioate linkage
  modified_base 20: mod_base = OTHER; note = 2'-O-methyl modified nucleotide
  modified_base 21: mod_base = OTHER; note = 2'-fluoro modified nucleotide
  modified_base 22: mod_base = OTHER; note = 2'-O-methyl modified nucleotide
  modified_base 23: mod_base = OTHER; note = 2'-fluoro modified nucleotide
  modified_base 24: mod_base = OTHER; note = 2'-O-methyl modified nucleotide
  modified_base 25: mod_base = OTHER; note = 2'-fluoro modified nucleotide
  modified_base 26: mod_base = OTHER; note = 2'-O-methyl modified nucleotide
  modified_base 27: mod_base = OTHER; note = 2'-fluoro modified nucleotide
  modified_base 28: mod_base = OTHER; note = 2'-O-methyl modified nucleotide
  modified_base 29: mod_base = OTHER; note = 2'-fluoro modified nucleotide
  modified_base 30: mod_base = OTHER; note = 2'-O-methyl modified nucleotide
  modified_base 31: mod_base = OTHER; note = 2'-fluoro modified nucleotide with phosphorothioate linkage
  modified_base 32: mod_base = OTHER; note = 2'-O-methyl modified nucleotide with phosphorothioate linkage
  misc_difference 33: note = 2'-fluoro modified nucleotide with phosphorothioate linkage may be attached to trivalent N-Acetylgalactosamine
ttgtactcgtcaaagtcattttgacgagtacaa

SEQ ID NO: 1038 - RNA, 33 nt, synthetic construct
  source 1..33: mol_type = other RNA
  misc_difference 1: note = 2'-O-methyl modified nucleotide with phosphorothioate linkage may be modified with 5'-Phosphate
  modified_base 2: mod_base = OTHER; note = 2'-fluoro modified nucleotide with phosphorothioate linkage
  modified_base 3: mod_base = OTHER; note = 2'-O-methyl modified nucleotide
  modified_base 4: mod_base = OTHER; note = 2'-fluoro modified nucleotide
  modified_base 5: mod_base = OTHER; note = 2'-O-methyl modified nucleotide
  modified_base 6: mod_base = OTHER; note = 2'-fluoro modified nucleotide
  modified_base 7: mod_base = OTHER; note = 2'-O-methyl modified nucleotide
  modified_base 8: mod_base = OTHER; note = 2'-fluoro modified nucleotide
  modified_base 9: mod_base = OTHER; note = 2'-O-methyl modified nucleotide
  modified_base 10: mod_base = OTHER; note = 2'-fluoro modified nucleotide
  modified_base 11: mod_base = OTHER; note = 2'-O-methyl modified nucleotide
  modified_base 12: mod_base = OTHER; note = 2'-fluoro modified nucleotide
  modified_base 13: mod_base = OTHER; note = 2'-O-methyl modified nucleotide
  modified_base 14: mod_base = OTHER; note = 2'-fluoro modified nucleotide with phosphorothioate linkage
  modified_base 15: mod_base = OTHER; note = 2'-O-methyl modified nucleotide with phosphorothioate linkage
  modified_base 16: mod_base = OTHER; note = 2'-fluoro modified nucleotide with phosphorothioate linkage
  modified_base 17: mod_base = OTHER; note = 2'-O-methyl modified nucleotide with phosphorothioate linkage
  modified_base 18: mod_base = OTHER; note = 2'-fluoro modified nucleotide with phosphorothioate linkage
  modified_base 19: mod_base = OTHER; note = 2'-O-methyl modified nucleotide with phosphorothioate linkage
  modified_base 20: mod_base = OTHER; note = 2'-O-methyl modified nucleotide
  modified_base 21: mod_base = OTHER; note = 2'-fluoro modified nucleotide
  modified_base 22: mod_base = OTHER; note = 2'-O-methyl modified nucleotide
  modified_base 23: mod_base = OTHER; note = 2'-fluoro modified nucleotide
  modified_base 24: mod_base = OTHER; note = 2'-O-methyl modified nucleotide
  modified_base 25: mod_base = OTHER; note = 2'-fluoro modified nucleotide
  modified_base 26: mod_base = OTHER; note = 2'-O-methyl modified nucleotide
  modified_base 27: mod_base = OTHER; note = 2'-fluoro modified nucleotide
  modified_base 28: mod_base = OTHER; note = 2'-O-methyl modified nucleotide
  modified_base 29: mod_base = OTHER; note = 2'-fluoro modified nucleotide
  modified_base 30: mod_base = OTHER; note = 2'-O-methyl modified nucleotide
  modified_base 31: mod_base = OTHER; note = 2'-fluoro modified nucleotide with phosphorothioate linkage
  modified_base 32: mod_base = OTHER; note = 2'-O-methyl modified nucleotide with phosphorothioate linkage
  misc_difference 33: note = 2'-fluoro modified nucleotide with phosphorothioate linkage may be attached to trivalent N-Acetylgalactosamine
tccgtgagggccatgtcttatggccctcacgga

SEQ ID NO: 1039 - RNA, 33 nt, synthetic construct
  source 1..33: mol_type = other RNA
  misc_difference 1: note = 2'-O-methyl modified nucleotide with phosphorothioate linkage may be modified with 5'-Phosphate
  modified_base 2: mod_base = OTHER; note = 2'-fluoro modified nucleotide with phosphorothioate linkage
  modified_base 3: mod_base = OTHER; note = 2'-O-methyl modified nucleotide
  modified_base 4: mod_base = OTHER; note = 2'-fluoro modified nucleotide
  modified_base 5: mod_base = OTHER; note = 2'-O-methyl modified nucleotide
  modified_base 6: mod_base = OTHER; note = 2'-fluoro modified nucleotide
  modified_base 7: mod_base = OTHER; note = 2'-O-methyl modified nucleotide
  modified_base 8: mod_base = OTHER; note = 2'-fluoro modified nucleotide
  modified_base 9: mod_base = OTHER; note = 2'-O-methyl modified nucleotide
  modified_base 10: mod_base = OTHER; note = 2'-fluoro modified nucleotide
  modified_base 11: mod_base = OTHER; note = 2'-O-methyl modified nucleotide
  modified_base 12: mod_base = OTHER; note = 2'-fluoro modified nucleotide
  modified_base 13: mod_base = OTHER; note = 2'-O-methyl modified nucleotide
  modified_base 14: mod_base = OTHER; note = 2'-fluoro modified nucleotide with phosphorothioate linkage
  modified_base 15: mod_base = OTHER; note = 2'-O-methyl modified nucleotide with phosphorothioate linkage
  modified_base 16: mod_base = OTHER; note = 2'-fluoro modified nucleotide with phosphorothioate linkage
  modified_base 17: mod_base = OTHER; note = 2'-O-methyl modified nucleotide with phosphorothioate linkage
  modified_base 18: mod_base = OTHER; note = 2'-fluoro modified nucleotide with phosphorothioate linkage
  modified_base 19: mod_base = OTHER; note = 2'-O-methyl modified nucleotide with phosphorothioate linkage
  modified_base 20: mod_base = OTHER; note = 2'-O-methyl modified nucleotide
  modified_base 21: mod_base = OTHER; note = 2'-fluoro modified nucleotide
  modified_base 22: mod_base = OTHER; note = 2'-O-methyl modified nucleotide
  modified_base 23: mod_base = OTHER; note = 2'-fluoro modified nucleotide
  modified_base 24: mod_base = OTHER; note = 2'-O-methyl modified nucleotide
  modified_base 25: mod_base = OTHER; note = 2'-fluoro modified nucleotide
  modified_base 26: mod_base = OTHER; note = 2'-O-methyl modified nucleotide
  modified_base 27: mod_base = OTHER; note = 2'-fluoro modified nucleotide
  modified_base 28: mod_base = OTHER; note = 2'-O-methyl modified nucleotide
  modified_base 29: mod_base = OTHER; note = 2'-fluoro modified nucleotide
  modified_base 30: mod_base = OTHER; note = 2'-O-methyl modified nucleotide
  modified_base 31: mod_base = OTHER; note = 2'-fluoro modified nucleotide with phosphorothioate linkage
  modified_base 32: mod_base = OTHER; note = 2'-O-methyl modified nucleotide with phosphorothioate linkage
  misc_difference 33: note = 2'-fluoro modified nucleotide with phosphorothioate linkage may be attached to trivalent N-Acetylgalactosamine
tggttctcaatgttgaccaaacattgagaacca

SEQ ID NO: 1040 - RNA, 33 nt, synthetic construct
  source 1..33: mol_type = other RNA
  misc_difference 1: note = 2'-O-methyl modified nucleotide with phosphorothioate linkage may be modified with 5'-Phosphate
  modified_base 2: mod_base = OTHER; note = 2'-fluoro modified nucleotide with phosphorothioate linkage
  modified_base 3: mod_base = OTHER; note = 2'-O-methyl modified nucleotide
  modified_base 4: mod_base = OTHER; note = 2'-fluoro modified nucleotide
  modified_base 5: mod_base = OTHER; note = 2'-O-methyl modified nucleotide
  modified_base 6: mod_base = OTHER; note = 2'-fluoro modified nucleotide
  modified_base 7: mod_base = OTHER; note = 2'-O-methyl modified nucleotide
  modified_base 8: mod_base = OTHER; note = 2'-fluoro modified nucleotide
  modified_base 9: mod_base = OTHER; note = 2'-O-methyl modified nucleotide
  modified_base 10: mod_base = OTHER; note = 2'-fluoro modified nucleotide
  modified_base 11: mod_base = OTHER; note = 2'-O-methyl modified nucleotide
  modified_base 12: mod_base = OTHER; note = 2'-fluoro modified nucleotide
  modified_base 13: mod_base = OTHER; note = 2'-O-methyl modified nucleotide
  modified_base 14: mod_base = OTHER; note = 2'-fluoro modified nucleotide with phosphorothioate linkage
  modified_base 15: mod_base = OTHER; note = 2'-O-methyl modified nucleotide with phosphorothioate linkage
  modified_base 16: mod_base = OTHER; note = 2'-fluoro modified nucleotide with phosphorothioate linkage
  modified_base 17: mod_base = OTHER; note = 2'-O-methyl modified nucleotide with phosphorothioate linkage
  modified_base 18: mod_base = OTHER; note = 2'-fluoro modified nucleotide with phosphorothioate linkage
  modified_base 19: mod_base = OTHER; note = 2'-O-methyl modified nucleotide with phosphorothioate linkage
  modified_base 20: mod_base = OTHER; note = 2'-O-methyl modified nucleotide
  modified_base 21: mod_base = OTHER; note = 2'-fluoro modified nucleotide
  modified_base 22: mod_base = OTHER; note = 2'-O-methyl modified nucleotide
  modified_base 23: mod_base = OTHER; note = 2'-fluoro modified nucleotide
  modified_base 24: mod_base = OTHER; note = 2'-O-methyl modified nucleotide
  modified_base 25: mod_base = OTHER; note = 2'-fluoro modified nucleotide
  modified_base 26: mod_base = OTHER; note = 2'-O-methyl modified nucleotide
  modified_base 27: mod_base = OTHER; note = 2'-fluoro modified nucleotide
  modified_base 28: mod_base = OTHER; note = 2'-O-methyl modified nucleotide
  modified_base 29: mod_base = OTHER; note = 2'-fluoro modified nucleotide
  modified_base 30: mod_base = OTHER; note = 2'-O-methyl modified nucleotide
  modified_base 31: mod_base = OTHER; note = 2'-fluoro modified nucleotide with phosphorothioate linkage
  modified_base 32: mod_base = OTHER; note = 2'-O-methyl modified nucleotide with phosphorothioate linkage
  misc_difference 33: note = 2'-fluoro modified nucleotide with phosphorothioate linkage may be attached to trivalent N-Acetylgalactosamine
tctgacaccgtcactgatggtgacggtgtcaga

SEQ ID NO: 1041 - RNA, 33 nt, synthetic construct; identical to SEQ ID NO: 591
  source 1..33: mol_type = other RNA
  misc_difference 1: note = 2'-O-methyl modified nucleotide with phosphorothioate linkage may be modified with 5'-Phosphate
  modified_base 2: mod_base = OTHER; note = 2'-fluoro modified nucleotide with phosphorothioate linkage
  modified_base 3: mod_base = OTHER; note = 2'-O-methyl modified nucleotide
  modified_base 4: mod_base = OTHER; note = 2'-fluoro modified nucleotide
  modified_base 5: mod_base = OTHER; note = 2'-O-methyl modified nucleotide
  modified_base 6: mod_base = OTHER; note = 2'-fluoro modified nucleotide
  modified_base 7: mod_base = OTHER; note = 2'-O-methyl modified nucleotide
  modified_base 8: mod_base = OTHER; note = 2'-fluoro modified nucleotide
  modified_base 9: mod_base = OTHER; note = 2'-O-methyl modified nucleotide
  modified_base 10: mod_base = OTHER; note = 2'-fluoro modified nucleotide
  modified_base 11: mod_base = OTHER; note = 2'-O-methyl modified nucleotide
  modified_base 12: mod_base = OTHER; note = 2'-fluoro modified nucleotide
  modified_base 13: mod_base = OTHER; note = 2'-O-methyl modified nucleotide
  modified_base 14: mod_base = OTHER; note = 2'-fluoro modified nucleotide with phosphorothioate linkage
  modified_base 15: mod_base = OTHER; note = 2'-O-methyl modified nucleotide with phosphorothioate linkage
  modified_base 16: mod_base = OTHER; note = 2'-fluoro modified nucleotide with phosphorothioate linkage
  modified_base 17: mod_base = OTHER; note = 2'-O-methyl modified nucleotide with phosphorothioate linkage
  modified_base 18: mod_base = OTHER; note = 2'-fluoro modified nucleotide with phosphorothioate linkage
  modified_base 19: mod_base = OTHER; note = 2'-O-methyl modified nucleotide with phosphorothioate linkage
  modified_base 20: mod_base = OTHER; note = 2'-O-methyl modified nucleotide
  modified_base 21: mod_base = OTHER; note = 2'-fluoro modified nucleotide
  modified_base 22: mod_base = OTHER; note = 2'-O-methyl modified nucleotide
  modified_base 23: mod_base = OTHER; note = 2'-fluoro modified nucleotide
  modified_base 24: mod_base = OTHER; note = 2'-O-methyl modified nucleotide
  modified_base 25: mod_base = OTHER; note = 2'-fluoro modified nucleotide
  modified_base 26: mod_base = OTHER; note = 2'-O-methyl modified nucleotide
  modified_base 27: mod_base = OTHER; note = 2'-fluoro modified nucleotide
  modified_base 28: mod_base = OTHER; note = 2'-O-methyl modified nucleotide
  modified_base 29: mod_base = OTHER; note = 2'-fluoro modified nucleotide
  modified_base 30: mod_base = OTHER; note = 2'-O-methyl modified nucleotide
  modified_base 31: mod_base = OTHER; note = 2'-fluoro modified nucleotide with phosphorothioate linkage
  modified_base 32: mod_base = OTHER; note = 2'-O-methyl modified nucleotide with phosphorothioate linkage
  misc_difference 33: note = 2'-fluoro modified nucleotide with phosphorothioate linkage may be attached to trivalent N-Acetylgalactosamine

SEQ ID NO: 1042 - RNA, 33 nt, synthetic construct; identical to SEQ ID NO: 592
  source 1..33: mol_type = other RNA
  misc_difference 1: note = 2'-O-methyl modified nucleotide with phosphorothioate linkage may be modified with 5'-Phosphate
  modified_base 2: mod_base = OTHER; note = 2'-fluoro modified nucleotide with phosphorothioate linkage
  modified_base 3: mod_base = OTHER; note = 2'-O-methyl modified nucleotide
  modified_base 4: mod_base = OTHER; note = 2'-fluoro modified nucleotide
  modified_base 5: mod_base = OTHER; note = 2'-O-methyl modified nucleotide
  modified_base 6: mod_base = OTHER; note = 2'-fluoro modified nucleotide
  modified_base 7: mod_base = OTHER; note = 2'-O-methyl modified nucleotide
  modified_base 8: mod_base = OTHER; note = 2'-fluoro modified nucleotide
  modified_base 9: mod_base = OTHER; note = 2'-O-methyl modified nucleotide
  modified_base 10: mod_base = OTHER; note = 2'-fluoro modified nucleotide
  modified_base 11: mod_base = OTHER; note = 2'-O-methyl modified nucleotide
  modified_base 12: mod_base = OTHER; note = 2'-fluoro modified nucleotide
  modified_base 13: mod_base = OTHER; note = 2'-O-methyl modified nucleotide
  modified_base 14: mod_base = OTHER; note = 2'-fluoro modified nucleotide with phosphorothioate linkage
  modified_base 15: mod_base = OTHER; note = 2'-O-methyl modified nucleotide with phosphorothioate linkage
  modified_base 16: mod_base = OTHER; note = 2'-fluoro modified nucleotide with phosphorothioate linkage
  modified_base 17: mod_base = OTHER; note = 2'-O-methyl modified nucleotide with phosphorothioate linkage
  modified_base 18: mod_base = OTHER; note = 2'-fluoro modified nucleotide with phosphorothioate linkage
  modified_base 19: mod_base = OTHER; note = 2'-O-methyl modified nucleotide with phosphorothioate linkage
  modified_base 20: mod_base = OTHER; note = 2'-O-methyl modified nucleotide
  modified_base 21: mod_base = OTHER; note = 2'-fluoro modified nucleotide
  modified_base 22: mod_base = OTHER; note = 2'-O-methyl modified nucleotide
  modified_base 23: mod_base = OTHER; note = 2'-fluoro modified nucleotide
  modified_base 24: mod_base = OTHER; note = 2'-O-methyl modified nucleotide
  modified_base 25: mod_base = OTHER; note = 2'-fluoro modified nucleotide
  modified_base 26: mod_base = OTHER; note = 2'-O-methyl modified nucleotide
  modified_base 27: mod_base = OTHER; note = 2'-fluoro modified nucleotide
  modified_base 28: mod_base = OTHER; note = 2'-O-methyl modified nucleotide
  modified_base 29: mod_base = OTHER; note = 2'-fluoro modified nucleotide
  modified_base 30: mod_base = OTHER; note = 2'-O-methyl modified nucleotide
  modified_base 31: mod_base = OTHER; note = 2'-fluoro modified nucleotide with phosphorothioate linkage
  modified_base 32: mod_base = OTHER; note = 2'-O-methyl modified nucleotide with phosphorothioate linkage
  misc_difference 33: note = 2'-fluoro modified nucleotide with phosphorothioate linkage may be attached to trivalent N-Acetylgalactosamine

SEQ ID NO: 1043 - RNA, 33 nt, synthetic construct
  source 1..33: mol_type = other RNA
  misc_difference 1: note = 2'-O-methyl modified nucleotide with phosphorothioate linkage may be modified with 5'-Phosphate
  modified_base 2: mod_base = OTHER; note = 2'-fluoro modified nucleotide with phosphorothioate linkage
  modified_base 3: mod_base = OTHER; note = 2'-O-methyl modified nucleotide
  modified_base 4: mod_base = OTHER; note = 2'-fluoro modified nucleotide
  modified_base 5: mod_base = OTHER; note = 2'-O-methyl modified nucleotide
  modified_base 6: mod_base = OTHER; note = 2'-fluoro modified nucleotide
  modified_base 7: mod_base = OTHER; note = 2'-O-methyl modified nucleotide
  modified_base 8: mod_base = OTHER; note = 2'-fluoro modified nucleotide
  modified_base 9: mod_base = OTHER; note = 2'-O-methyl modified nucleotide
  modified_base 10: mod_base = OTHER; note = 2'-fluoro modified nucleotide
  modified_base 11: mod_base = OTHER; note = 2'-O-methyl modified nucleotide
  modified_base 12: mod_base = OTHER; note = 2'-fluoro modified nucleotide
  modified_base 13: mod_base = OTHER; note = 2'-O-methyl modified nucleotide
  modified_base 14: mod_base = OTHER; note = 2'-fluoro modified nucleotide with phosphorothioate linkage
  modified_base 15: mod_base = OTHER; note = 2'-O-methyl modified nucleotide with phosphorothioate linkage
  modified_base 16: mod_base = OTHER; note = 2'-fluoro modified nucleotide with phosphorothioate linkage
  modified_base 17: mod_base = OTHER; note = 2'-O-methyl modified nucleotide with phosphorothioate linkage
  modified_base 18: mod_base = OTHER; note = 2'-fluoro modified nucleotide with phosphorothioate linkage
  modified_base 19: mod_base = OTHER; note = 2'-O-methyl modified nucleotide with phosphorothioate linkage
  modified_base 20: mod_base = OTHER; note = 2'-O-methyl modified nucleotide
  modified_base 21: mod_base = OTHER; note = 2'-fluoro modified nucleotide
  modified_base 22: mod_base = OTHER; note = 2'-O-methyl modified nucleotide
  modified_base 23: mod_base = OTHER; note = 2'-fluoro modified nucleotide
  modified_base 24: mod_base = OTHER; note = 2'-O-methyl modified nucleotide
  modified_base 25: mod_base = OTHER; note = 2'-fluoro modified nucleotide
  modified_base 26: mod_base = OTHER; note = 2'-O-methyl modified nucleotide
  modified_base 27: mod_base = OTHER; note = 2'-fluoro modified nucleotide
  modified_base 28: mod_base = OTHER; note = 2'-O-methyl modified nucleotide
  modified_base 29: mod_base = OTHER; note = 2'-fluoro modified nucleotide
  modified_base 30: mod_base = OTHER; note = 2'-O-methyl modified nucleotide
  modified_base 31: mod_base = OTHER; note = 2'-fluoro modified nucleotide with phosphorothioate linkage
  modified_base 32: mod_base = OTHER; note = 2'-O-methyl modified nucleotide with phosphorothioate linkage
  misc_difference 33: note = 2'-fluoro modified nucleotide with phosphorothioate linkage may be attached to trivalent N-Acetylgalactosamine
tctcattttccttggtctccaaggaaaatgaga

SEQ ID NO: 1044 - RNA, 33 nt, synthetic construct
  source 1..33: mol_type = other RNA
  misc_difference 1: note = 2'-O-methyl modified nucleotide with phosphorothioate linkage may be modified with 5'-Phosphate
  modified_base 2: mod_base = OTHER; note = 2'-fluoro modified nucleotide with phosphorothioate linkage
  modified_base 3: mod_base = OTHER; note = 2'-O-methyl modified nucleotide
  modified_base 4: mod_base = OTHER; note = 2'-fluoro modified nucleotide
  modified_base 5: mod_base = OTHER; note = 2'-O-methyl modified nucleotide
  modified_base 6: mod_base = OTHER; note = 2'-fluoro modified nucleotide
  modified_base 7: mod_base = OTHER; note = 2'-O-methyl modified nucleotide
  modified_base 8: mod_base = OTHER; note = 2'-fluoro modified nucleotide
  modified_base 9: mod_base = OTHER; note = 2'-O-methyl modified nucleotide
  modified_base 10: mod_base = OTHER; note = 2'-fluoro modified nucleotide
  modified_base 11: mod_base = OTHER; note = 2'-O-methyl modified nucleotide
  modified_base 12: mod_base = OTHER; note = 2'-fluoro modified nucleotide
  modified_base 13: mod_base = OTHER; note = 2'-O-methyl modified nucleotide
  modified_base 14: mod_base = OTHER; note = 2'-fluoro modified nucleotide with phosphorothioate linkage
  modified_base 15: mod_base = OTHER; note = 2'-O-methyl modified nucleotide with phosphorothioate linkage
  modified_base 16: mod_base = OTHER; note = 2'-fluoro modified nucleotide with phosphorothioate linkage
  modified_base 17: mod_base = OTHER; note = 2'-O-methyl modified nucleotide with phosphorothioate linkage
  modified_base 18: mod_base = OTHER; note = 2'-fluoro modified nucleotide with phosphorothioate linkage
  modified_base 19: mod_base = OTHER; note = 2'-O-methyl modified nucleotide with phosphorothioate linkage
  modified_base 20: mod_base = OTHER; note = 2'-O-methyl modified nucleotide
  modified_base 21: mod_base = OTHER; note = 2'-fluoro modified nucleotide
  modified_base 22: mod_base = OTHER; note = 2'-O-methyl modified nucleotide
  modified_base 23: mod_base = OTHER; note = 2'-fluoro modified nucleotide
  modified_base 24: mod_base = OTHER; note = 2'-O-methyl modified nucleotide
  modified_base 25: mod_base = OTHER; note = 2'-fluoro modified nucleotide
  modified_base 26: mod_base = OTHER; note = 2'-O-methyl modified nucleotide
  modified_base 27: mod_base = OTHER; note = 2'-fluoro modified nucleotide
  modified_base 28: mod_base = OTHER; note = 2'-O-methyl modified nucleotide
  modified_base 29: mod_base = OTHER; note = 2'-fluoro modified nucleotide
  modified_base 30: mod_base = OTHER; note = 2'-O-methyl modified nucleotide
  modified_base 31: mod_base = OTHER; note = 2'-fluoro modified nucleotide with phosphorothioate linkage
  modified_base 32: mod_base = OTHER; note = 2'-O-methyl modified nucleotide with phosphorothioate linkage
  misc_difference 33: note = 2'-fluoro modified nucleotide with phosphorothioate linkage may be attached to trivalent N-Acetylgalactosamine
tacttttgtatgaagcaatttcatacaaaagta

SEQ ID NO: 1045 - RNA, 33 nt, synthetic construct
  source 1..33: mol_type = other RNA
  misc_difference 1: note = 2'-O-methyl modified nucleotide with phosphorothioate linkage may be modified with 5'-Phosphate
  modified_base 2: mod_base = OTHER; note = 2'-fluoro modified nucleotide with phosphorothioate linkage
  modified_base 3: mod_base = OTHER; note = 2'-O-methyl modified nucleotide
  modified_base 4: mod_base = OTHER; note = 2'-fluoro modified nucleotide
  modified_base 5: mod_base = OTHER; note = 2'-O-methyl modified nucleotide
  modified_base 6: mod_base = OTHER; note = 2'-fluoro modified nucleotide
  modified_base 7: mod_base = OTHER; note = 2'-O-methyl modified nucleotide
  modified_base 8: mod_base = OTHER; note = 2'-fluoro modified nucleotide
  modified_base 9: mod_base = OTHER; note = 2'-O-methyl modified nucleotide
  modified_base 10: mod_base = OTHER; note = 2'-fluoro modified nucleotide
  modified_base 11: mod_base = OTHER; note = 2'-O-methyl modified nucleotide
  modified_base 12: mod_base = OTHER; note = 2'-fluoro modified nucleotide
  modified_base 13: mod_base = OTHER; note = 2'-O-methyl modified nucleotide
  modified_base 14: mod_base = OTHER; note = 2'-fluoro modified nucleotide with phosphorothioate linkage
  modified_base 15: mod_base = OTHER; note = 2'-O-methyl modified nucleotide with phosphorothioate linkage
  modified_base 16: mod_base = OTHER; note = 2'-fluoro modified nucleotide with phosphorothioate linkage
  modified_base 17: mod_base = OTHER; note = 2'-O-methyl modified nucleotide with phosphorothioate linkage
  modified_base 18: mod_base = OTHER; note = 2'-fluoro modified nucleotide with phosphorothioate linkage
  modified_base 19: mod_base = OTHER; note = 2'-O-methyl modified nucleotide with phosphorothioate linkage
  modified_base 20: mod_base = OTHER; note = 2'-O-methyl modified nucleotide
  modified_base 21: mod_base = OTHER; note = 2'-fluoro modified nucleotide
  modified_base 22: mod_base = OTHER; note = 2'-O-methyl modified nucleotide
  modified_base 23: mod_base = OTHER; note = 2'-fluoro modified nucleotide
  modified_base 24: mod_base = OTHER; note = 2'-O-methyl modified nucleotide
  modified_base 25: mod_base = OTHER; note = 2'-fluoro modified nucleotide
  modified_base 26: mod_base = OTHER; note = 2'-O-methyl modified nucleotide
  modified_base 27: mod_base = OTHER; note = 2'-fluoro modified nucleotide
  modified_base 28: mod_base = OTHER; note = 2'-O-methyl modified nucleotide
  modified_base 29: mod_base = OTHER; note = 2'-fluoro modified nucleotide
  modified_base 30: mod_base = OTHER; note = 2'-O-methyl modified nucleotide
  modified_base 31: mod_base = OTHER; note = 2'-fluoro modified nucleotide with phosphorothioate linkage
  modified_base 32: mod_base = OTHER; note = 2'-O-methyl modified nucleotide with phosphorothioate linkage
  misc_difference 33: note = 2'-fluoro modified nucleotide with phosphorothioate linkage may be attached to trivalent N-Acetylgalactosamine
tgagtgtgagaccttgtccaggtctcacactca

SEQ ID NO: 1046 - RNA, 33 nt, synthetic construct; identical to SEQ ID NO: 596
  source 1..33: mol_type = other RNA
  misc_difference 1: note = 2'-O-methyl modified nucleotide with phosphorothioate linkage may be modified with 5'-Phosphate
  modified_base 2: mod_base = OTHER; note = 2'-fluoro modified nucleotide with phosphorothioate linkage
  modified_base 3: mod_base = OTHER; note = 2'-O-methyl modified nucleotide
  modified_base 4: mod_base = OTHER; note = 2'-fluoro modified nucleotide
  modified_base 5: mod_base = OTHER; note = 2'-O-methyl modified nucleotide
  modified_base 6: mod_base = OTHER; note = 2'-fluoro modified nucleotide
  modified_base 7: mod_base = OTHER; note = 2'-O-methyl modified nucleotide
  modified_base 8: mod_base = OTHER; note = 2'-fluoro modified nucleotide
  modified_base 9: mod_base = OTHER; note = 2'-O-methyl modified nucleotide
  modified_base 10: mod_base = OTHER; note = 2'-fluoro modified nucleotide
  modified_base 11: mod_base = OTHER; note = 2'-O-methyl modified nucleotide
  modified_base 12: mod_base = OTHER; note = 2'-fluoro modified nucleotide
  modified_base 13: mod_base = OTHER; note = 2'-O-methyl modified nucleotide
  modified_base 14: mod_base = OTHER; note = 2'-fluoro modified nucleotide with phosphorothioate linkage
  modified_base 15: mod_base = OTHER; note = 2'-O-methyl modified nucleotide with phosphorothioate linkage
  modified_base 16: mod_base = OTHER; note = 2'-fluoro modified nucleotide with phosphorothioate linkage
  modified_base 17: mod_base = OTHER; note = 2'-O-methyl modified nucleotide with phosphorothioate linkage
  modified_base 18: mod_base = OTHER; note = 2'-fluoro modified nucleotide with phosphorothioate linkage
  modified_base 19: mod_base = OTHER; note = 2'-O-methyl modified nucleotide with phosphorothioate linkage
  modified_base 20: mod_base = OTHER; note = 2'-O-methyl modified nucleotide
  modified_base 21: mod_base = OTHER; note = 2'-fluoro modified nucleotide
  modified_base 22: mod_base = OTHER; note = 2'-O-methyl modified nucleotide
  modified_base 23: mod_base = OTHER; note = 2'-fluoro modified nucleotide
  modified_base 24: mod_base = OTHER; note = 2'-O-methyl modified nucleotide
  modified_base 25: mod_base = OTHER; note = 2'-fluoro modified nucleotide
  modified_base 26: mod_base = OTHER; note = 2'-O-methyl modified nucleotide
  modified_base 27: mod_base = OTHER; note = 2'-fluoro modified nucleotide
  modified_base 28: mod_base = OTHER; note = 2'-O-methyl modified nucleotide
  modified_base 29: mod_base = OTHER; note = 2'-fluoro modified nucleotide
  modified_base 30: mod_base = OTHER; note = 2'-O-methyl modified nucleotide
  modified_base 31: mod_base = OTHER; note = 2'-fluoro modified nucleotide with phosphorothioate linkage
  modified_base 32: mod_base = OTHER; note = 2'-O-methyl modified nucleotide with phosphorothioate linkage
  misc_difference 33: note = 2'-fluoro modified nucleotide with phosphorothioate linkage may be attached to trivalent N-Acetylgalactosamine

SEQ ID NO: 1047 - RNA, 33 nt, synthetic construct
  source 1..33: mol_type = other RNA
  misc_difference 1: note = 2'-O-methyl modified nucleotide with phosphorothioate linkage may be modified with 5'-Phosphate
  modified_base 2: mod_base = OTHER; note = 2'-fluoro modified nucleotide with phosphorothioate linkage
  modified_base 3: mod_base = OTHER; note = 2'-O-methyl modified nucleotide
  modified_base 4: mod_base = OTHER; note = 2'-fluoro modified nucleotide
  modified_base 5: mod_base = OTHER; note = 2'-O-methyl modified nucleotide
  modified_base 6: mod_base = OTHER; note = 2'-fluoro modified nucleotide
  modified_base 7: mod_base = OTHER; note = 2'-O-methyl modified nucleotide
  modified_base 8: mod_base = OTHER; note = 2'-fluoro modified nucleotide
  modified_base 9: mod_base = OTHER; note = 2'-O-methyl modified nucleotide
  modified_base 10: mod_base = OTHER; note = 2'-fluoro modified nucleotide
  modified_base 11: mod_base = OTHER; note = 2'-O-methyl modified nucleotide
  modified_base 12: mod_base = OTHER; note = 2'-fluoro modified nucleotide
  modified_base 13: mod_base = OTHER; note = 2'-O-methyl modified nucleotide
  modified_base 14: mod_base = OTHER; note = 2'-fluoro modified nucleotide with phosphorothioate linkage
  modified_base 15: mod_base = OTHER; note = 2'-O-methyl modified nucleotide with phosphorothioate linkage
  modified_base 16: mod_base = OTHER; note = 2'-fluoro modified nucleotide with phosphorothioate linkage
  modified_base 17: mod_base = OTHER; note = 2'-O-methyl modified nucleotide with phosphorothioate linkage
  modified_base 18: mod_base = OTHER; note = 2'-fluoro modified nucleotide with phosphorothioate linkage
  modified_base 19: mod_base = OTHER; note = 2'-O-methyl modified nucleotide with phosphorothioate linkage
  modified_base 20: mod_base = OTHER; note = 2'-O-methyl modified nucleotide
  modified_base 21: mod_base = OTHER; note = 2'-fluoro modified nucleotide
  modified_base 22: mod_base = OTHER; note = 2'-O-methyl modified nucleotide
  modified_base 23: mod_base = OTHER; note = 2'-fluoro modified nucleotide
  modified_base 24: mod_base = OTHER; note = 2'-O-methyl modified nucleotide
  modified_base 25: mod_base = OTHER; note = 2'-fluoro modified nucleotide
  modified_base 26: mod_base = OTHER; note = 2'-O-methyl modified nucleotide
  modified_base 27: mod_base = OTHER; note = 2'-fluoro modified nucleotide
  modified_base 28: mod_base = OTHER; note = 2'-O-methyl modified nucleotide
  modified_base 29: mod_base = OTHER; note = 2'-fluoro modified nucleotide
  modified_base 30: mod_base = OTHER; note = 2'-O-methyl modified nucleotide
  modified_base 31: mod_base = OTHER; note = 2'-fluoro modified nucleotide with phosphorothioate linkage
  modified_base 32: mod_base = OTHER; note = 2'-O-methyl modified nucleotide with phosphorothioate linkage
  misc_difference 33: note = 2'-fluoro modified nucleotide with phosphorothioate linkage may be attached to trivalent N-Acetylgalactosamine
tcaacctgcacctcatccggaggtgcaggttga

SEQ ID NO: 1048 - RNA, 33 nt, synthetic construct; identical to SEQ ID NO: 598
  source 1..33: mol_type = other RNA
  misc_difference 1: note = 2'-O-methyl modified nucleotide with phosphorothioate linkage may be modified with 5'-Phosphate
  modified_base 2: mod_base = OTHER; note = 2'-fluoro modified nucleotide with phosphorothioate linkage
  modified_base 3: mod_base = OTHER; note = 2'-O-methyl modified nucleotide
  modified_base 4: mod_base = OTHER; note = 2'-fluoro modified nucleotide
  modified_base 5: mod_base = OTHER; note = 2'-O-methyl modified nucleotide
  modified_base 6: mod_base = OTHER; note = 2'-fluoro modified nucleotide
  modified_base 7: mod_base = OTHER; note = 2'-O-methyl modified nucleotide
  modified_base 8: mod_base = OTHER; note = 2'-fluoro modified nucleotide
  modified_base 9: mod_base = OTHER; note = 2'-O-methyl modified nucleotide
  modified_base 10: mod_base = OTHER; note = 2'-fluoro modified nucleotide
  modified_base 11: mod_base = OTHER; note = 2'-O-methyl modified nucleotide
  modified_base 12: mod_base = OTHER; note = 2'-fluoro modified nucleotide
  modified_base 13: mod_base = OTHER; note = 2'-O-methyl modified nucleotide
  modified_base 14: mod_base = OTHER; note = 2'-fluoro modified nucleotide with phosphorothioate linkage
  modified_base 15: mod_base = OTHER; note = 2'-O-methyl modified nucleotide with phosphorothioate linkage
  modified_base 16: mod_base = OTHER; note = 2'-fluoro modified nucleotide with phosphorothioate linkage
  modified_base 17: mod_base = OTHER; note = 2'-O-methyl modified nucleotide with phosphorothioate linkage
  modified_base 18: mod_base = OTHER; note = 2'-fluoro modified nucleotide with phosphorothioate linkage
  modified_base 19: mod_base = OTHER; note = 2'-O-methyl modified nucleotide with phosphorothioate linkage
  modified_base 20: mod_base = OTHER; note = 2'-O-methyl modified nucleotide
  modified_base 21: mod_base = OTHER; note = 2'-fluoro modified nucleotide
  modified_base 22: mod_base = OTHER; note = 2'-O-methyl modified nucleotide
  modified_base 23: mod_base = OTHER; note = 2'-fluoro modified nucleotide
  modified_base 24: mod_base = OTHER; note = 2'-O-methyl modified nucleotide
  modified_base 25: mod_base = OTHER; note = 2'-fluoro modified nucleotide
  modified_base 26: mod_base = OTHER; note = 2'-O-methyl modified nucleotide
  modified_base 27: mod_base = OTHER; note = 2'-fluoro modified nucleotide
  modified_base 28: mod_base = OTHER; note = 2'-O-methyl modified nucleotide
  modified_base 29: mod_base = OTHER; note = 2'-fluoro modified nucleotide
  modified_base 30: mod_base = OTHER; note = 2'-O-methyl modified nucleotide
  modified_base 31: mod_base = OTHER; note = 2'-fluoro modified nucleotide with phosphorothioate linkage
  modified_base 32: mod_base = OTHER; note = 2'-O-methyl modified nucleotide with phosphorothioate linkage
  misc_difference 33: note = 2'-fluoro modified nucleotide with phosphorothioate linkage may be attached to trivalent N-Acetylgalactosamine

SEQ ID NO: 1049 - RNA, 33 nt, synthetic construct; identical to SEQ ID NO: 599
  source 1..33: mol_type = other RNA
  misc_difference 1: note = 2'-O-methyl modified nucleotide with phosphorothioate linkage may be modified with 5'-Phosphate
  modified_base 2: mod_base = OTHER; note = 2'-fluoro modified nucleotide with phosphorothioate linkage
  modified_base 3: mod_base = OTHER; note = 2'-O-methyl modified nucleotide
  modified_base 4: mod_base = OTHER; note = 2'-fluoro modified nucleotide
  modified_base 5: mod_base = OTHER; note = 2'-O-methyl modified nucleotide
  modified_base 6: mod_base = OTHER; note = 2'-fluoro modified nucleotide
  modified_base 7: mod_base = OTHER; note = 2'-O-methyl modified nucleotide
  modified_base 8: mod_base = OTHER; note = 2'-fluoro modified nucleotide
  modified_base 9: mod_base = OTHER; note = 2'-O-methyl modified nucleotide
  modified_base 10: mod_base = OTHER; note = 2'-fluoro modified nucleotide
  modified_base 11: mod_base = OTHER; note = 2'-O-methyl modified nucleotide
  modified_base 12: mod_base = OTHER; note = 2'-fluoro modified nucleotide
  modified_base 13: mod_base = OTHER; note = 2'-O-methyl modified nucleotide
  modified_base 14: mod_base = OTHER; note = 2'-fluoro modified nucleotide with phosphorothioate linkage
  modified_base 15: mod_base = OTHER; note = 2'-O-methyl modified nucleotide with phosphorothioate linkage
  modified_base 16: mod_base = OTHER; note = 2'-fluoro modified nucleotide with phosphorothioate linkage
  modified_base 17: mod_base = OTHER; note = 2'-O-methyl modified nucleotide with phosphorothioate linkage
  modified_base 18: mod_base = OTHER; note = 2'-fluoro modified nucleotide with phosphorothioate linkage
  modified_base 19: mod_base = OTHER; note = 2'-O-methyl modified nucleotide with phosphorothioate linkage
  modified_base 20: mod_base = OTHER; note = 2'-O-methyl modified nucleotide
  modified_base 21: mod_base = OTHER; note = 2'-fluoro modified nucleotide
  modified_base 22: mod_base = OTHER; note = 2'-O-methyl modified nucleotide
  modified_base 23: mod_base = OTHER; note = 2'-fluoro modified nucleotide
  modified_base 24: mod_base = OTHER; note = 2'-O-methyl modified nucleotide
  modified_base 25: mod_base = OTHER; note = 2'-fluoro modified nucleotide
  modified_base 26: mod_base = OTHER; note = 2'-O-methyl modified nucleotide
  modified_base 27: mod_base = OTHER; note = 2'-fluoro modified nucleotide
  modified_base 28: mod_base = OTHER; note = 2'-O-methyl modified nucleotide
  modified_base 29: mod_base = OTHER; note = 2'-fluoro modified nucleotide
  modified_base 30: mod_base = OTHER; note = 2'-O-methyl modified nucleotide
  modified_base 31: mod_base = OTHER; note = 2'-fluoro modified nucleotide with phosphorothioate linkage
  modified_base 32: mod_base = OTHER; note = 2'-O-methyl modified nucleotide with phosphorothioate linkage
  misc_difference 33: note = 2'-fluoro modified nucleotide with phosphorothioate linkage may be attached to trivalent N-Acetylgalactosamine

SEQ ID NO: 1050 - RNA, 33 nt, synthetic construct
  source 1..33: mol_type = other RNA
  misc_difference 1: note = 2'-O-methyl modified nucleotide with phosphorothioate linkage may be modified with 5'-Phosphate
  modified_base 2: mod_base = OTHER; note = 2'-fluoro modified nucleotide with phosphorothioate linkage
  modified_base 3: mod_base = OTHER; note = 2'-O-methyl modified nucleotide
  modified_base 4: mod_base = OTHER; note = 2'-fluoro modified nucleotide
  modified_base 5: mod_base = OTHER; note = 2'-O-methyl modified nucleotide
  modified_base 6: mod_base = OTHER; note = 2'-fluoro modified nucleotide
  modified_base 7: mod_base = OTHER; note = 2'-O-methyl modified nucleotide
  modified_base 8: mod_base = OTHER; note = 2'-fluoro modified nucleotide
  modified_base 9: mod_base = OTHER; note = 2'-O-methyl modified nucleotide
  modified_base 10: mod_base = OTHER; note = 2'-fluoro modified nucleotide
  modified_base 11: mod_base = OTHER; note = 2'-O-methyl modified nucleotide
  modified_base 12: mod_base = OTHER; note = 2'-fluoro modified nucleotide
  modified_base 13: mod_base = OTHER; note = 2'-O-methyl modified nucleotide
  modified_base 14: mod_base = OTHER; note = 2'-fluoro modified nucleotide with phosphorothioate linkage
  modified_base 15: mod_base = OTHER; note = 2'-O-methyl modified nucleotide with phosphorothioate linkage
  modified_base 16: mod_base = OTHER; note = 2'-fluoro modified nucleotide with phosphorothioate linkage
  modified_base 17: mod_base = OTHER; note = 2'-O-methyl modified nucleotide with phosphorothioate linkage
  modified_base 18: mod_base = OTHER; note = 2'-fluoro modified nucleotide with phosphorothioate linkage
  modified_base 19: mod_base = OTHER; note = 2'-O-methyl modified nucleotide with phosphorothioate linkage
  modified_base 20: mod_base = OTHER; note = 2'-O-methyl modified nucleotide
  modified_base 21: mod_base = OTHER; note = 2'-fluoro modified nucleotide
  modified_base 22: mod_base = OTHER; note = 2'-O-methyl modified nucleotide
  modified_base 23: mod_base = OTHER; note = 2'-fluoro modified nucleotide
  modified_base 24: mod_base = OTHER; note = 2'-O-methyl modified nucleotide
  modified_base 25: mod_base = OTHER; note = 2'-fluoro modified nucleotide
  modified_base 26: mod_base = OTHER; note = 2'-O-methyl modified nucleotide
  modified_base 27: mod_base = OTHER; note = 2'-fluoro modified nucleotide
  modified_base 28: mod_base = OTHER; note = 2'-O-methyl modified nucleotide
  modified_base 29: mod_base = OTHER; note = 2'-fluoro modified nucleotide
  modified_base 30: mod_base = OTHER; note = 2'-O-methyl modified nucleotide
  modified_base 31: mod_base = OTHER; note = 2'-fluoro modified nucleotide with phosphorothioate linkage
  modified_base 32: mod_base = OTHER; note = 2'-O-methyl modified nucleotide with phosphorothioate linkage
  misc_difference 33: note = 2'-fluoro modified nucleotide with phosphorothioate linkage may be attached to trivalent N-Acetylgalactosamine
tagaagtcctgcattactgatgcaggacttcta
